United States Patent Application Publication US 2026/0058010 A1 - sequence listing, part 4

SEQ ID NO: 34 - DNA, 213242 bp, Homo sapiens
  source 1..213242: mol_type = genomic DNA
tcctatccctactggggactcagcaggagcctaagcctttgccaggattaatggttgagacagacagacaagcttcctttcatcatgggaaacccatttcagtctcctctgctcctttgatagcctggtggcattttctctccaggtcaaaaatcagcagaattccatagctgtggcgagaaaactcaacagggtcatcaggacgcactgctgttcccacccaatttctccaagcctccgtttctcctctgaatatggataatagggccaattttctacttcactgcattgctgtgaggactcaaagtcacctcctattctcttctctctccttgagtagaggggagggtagcatctcaacaccagggaaaaatcccatcacccagacggctggctcgcgtgtcagtggccgagcaaagacagacgccactctccccagcccctcctgagctccggcatccagaccttgatgctgctgagggccctgagcaggtgcccgcctcctggtggacgagcccctggtagctgcctggagacaatgggtagctggccacactgtgggagctgccctgcctgcctcaccctgcgggcctgccttcctggcaggaagccagcatttcctgggagcactgagcccctggcatttaaagcatcagatgtgggcaacatttatacctgactctagatggagctcgttgggcctgagtgacatttctagaggctgtggtcagaaactgggcgctctggtgaccactgctccctgaacaaacccctgcaggttactgctcaggggcagcaaggggccagccacacatcaggacaccgtgaggggagcaggtgaagacagtggtctgacactgctggtcccagaggcgctgctgtgctgcctcctgaagcacagtccaggagctccagctgggcctggcctgggtgccctgtgggtgggaaaggctttctggagggatttgccctaatggagccttcaagtctgtggataagccagagtaggggggtgaacagcagggaagcgggggctggaagggagctgggcaggcgcccagagtgaggcataggcacctggagtacggtgaacagacgtttcccatggccttggctcagccctcctgtagagtggccacacttgcccacacctcgcccaagcacagcatctgtgctgggtgcccactcaggctctggccctggagcagagctagggccatggtggaaagcccaggggacctcccaagacagaaactagctgcagaggtccagatggctacggggcgggggggagtaaagaaaggcatcccacctggaacatgcagacgagacagctgaaagcacaaggctgttgccccttggggggcttcacgtcccacttcacaatgcctgtgctattccacccaggggcatacctcagggggctcctagcccttggagaaacaggagtggtcctgtattgtgtcctgtattgcgaggcatgaaaaatgagccaggtaacaaggcaccatgctttgtgagcacatttaataaagaaagctgactgttcccggtggctgcctggatcctgggcgccctccatttctgtggccatgaaggatatttcctgggtaagggctaagcgctactcttggtaccgtccccttctgaccctcaccaggaactgcatggttggagcagcatctgatcccacctggagtgtgtggggtcccaaaagtccccacagtccccacagaggtatcaggatctctctctctccagctggctccagagcgcctggctgctccagagatacagacgcttctaactccatacaaggctggagaccagcagacgtggtacagaagtgagctctgccattccttttactttggggccctggcaccttttgccccaacagtcaagcttcctagggtcgaaaaaaactcctccatttccctctgcaacagctggttcctcctctccgcatcctcccgcgcccgttcagagttccgcagctttatttccagcatgatgtattttttcttttcctggtccagttcttcttctaaccgggacattcgttttctcaggtcagcactcccttcttcgattctgaaaagtcaaggagagatgctgtttgagactctgcgggccaggttcactgtcccatgggtataccatgcttgtgctcactgtgggttgaggggtcaggccaagccatggcggcaggaggaaaccctggctcatctgctcctcacaagaaccccagtacttcacccatgagcaaattgccccctgccatagctcccctagctcctctgggcctgtgatcccgaaatgccaacacaatgatccatgccttcggtgcctccctgggtccgcatttgcccctccagtgcagtatgggatccctgccagctggtaggaacagtacaggcccctgcatggggagggttgggactcggactgtcccctggcctttgctcctgtgctgtggcctcccctcccacagctccctgcagctccccacactgtccccatgatccagccacacgtggtgacccacagaagatcctgtggggtagtcacttcccttcctgctctcccgtcatgttcagctcaagcgccccctccatgatgctacttcctgtgatcctccccagcaggtcacaatggtgctcctctgtgccaccagagcctataccacacgcttccatgcaggctcatgctgcagtgtgccaaggttggcatggccatctttttgaccagacaaccagcttctgtctttccgaagggacacacctgagcccagcccctgggaacatatgctggattttaatgcccagcctggtgacctctgagccacatggctgtggacaggacacaagccacagtgaaatgcagagggtaactgctcctcagagcactggtaaccatggactggaacatgccaggggccagcacagcacctggtacgtggtgcatgatgaataaacacggattcctcaacccaccaaaacgaagcctccatcctcatcactgagcttgaagcatggcctgagccctccctaccaggatcacagacagctgtcagagagaagccacccacctccccactgctgcccctggctcgggcctggacctcccctcttccttctctgtcaggctcaagactccaagccccaactacacgctgatgaccctgcaccatttcatcagcatctctgacttaaagggtcctgaccctcatctccagaccactcttccgcagccctggtgcactcttggtgaacaccttccctcagctgctcagctgaacaatgatgtcctcccctaagtccattctttttctcggtcccatatctgatcagttagcaaaaccttttggctctaccttcaaaatatgctcagcacctggccgcttcccccacctccacctgctgccccatagggccacaccccccataggtcaggcctagacccccacacctcctaactggtctgttctgcccttgtcccctggcaagctctgctcggcatggcacccaggtgcacctgtcaaagtgcccaatgtgccaagaccctccagcggcttctcacttcattctcatctcactccacgaaaaaccagagcattgcccaggccaaaaggccccacccattgccccctccccacacatctccagtccccagcccctgactctcccccactacaggggtcttggggtcagtgctggctgcagctctggggtctccttcccagggccctccaaccttctaccctgaggctcctctccgctcccctccatgctgctctatgttcccctccttcatctcccttttaacacaccgtgtatttttaaaaatgtatcgtgcttatggtctttgtctccctgcaacccaaataagaatggggacagagattttgatcagttttcaccccaactgtggccacctgcacagcatctggtacttcacagaaaacaggttctcttttgggaatgcacgaaggaaggctgacttcccagcagggccctggggaggggctctgaccagagtcctgggagccaggacaaggccagcctcaccccaccccccacccgatggcccatacttccagagaacaggacacacattccccaatcacctgctggacaggacaggtgctaatgccctcaccttccttcctgtgctcagagaccttcctcactctagaccctccctctaaccaagacaacgacccagaccactctgctagcgagtacagtccctccacaagggctaccactgctatcccttttcctctgggaacctcatcttacctccagccaccaggcaggagtcaatgcgagcagcaaagtttcccgagcgctctcatccactgtgagtcacttaatactcaggacaaatgggtgaggtcactggggcccaaagatcctgccagggacactcagccaatccctggtggagctgggactagaatccaagtagtctgacctggagtcaaagagccctgcatctcccttgagaaaccaggcctcagagcaggccagaggagctccaggcactcagcacacaactggcgcagctggtccagcccagccttctgcatggacagccttctgtatggtaagagttcccatgtaccctgtagtttggtctgtgagctcatctgcagcagatagcatcttctactatatttctggaggcccttgggttctactgatgctatttcctttctcggctccatcctatgggtccttccagccctggctcaggcactgcctgctgtgacttcccccatggcagaggcctctgccctcaaggtccctctccttctcttccttttgcagacatggtgcctgtacatgcctggcactctccatcacccagggaacagctgtcagcagagcaaaagggcaagggctgccattccagctcccagtggaaatcacaggctcagagtgggcagcaggaatgccttccacctccatccactgcctctaatggataaaggaattccctgctagtgggtgggacccaggtgaacaggtcggccagctaacggggacctgcagccagagggaccaaggagtctgagatgctgagggaaacgccctgcgctggagaacctggtctccaggagctgaggttcctcactgcagagggcaaccccggtcctcatgggaggctggaactctggccctctgttagtgagattgtaagcctcagggtgcagcacaaccatcctgtgacaagggcggacacgagggcttggttcagcagggaaactggattctgatcccatcaaggaaggggtcctcacttccagcctggctgacctggggcctgggcacttcctggcactcagcatccaggctatgagcccttgtactgggacaagcctgggacctgcctccaggggccgccccctccctggctgcagactgcacactgactctgtttccacccctgcagcaaaggtccccggcaggctgggcaggcattcccacttgcgtggagtcagcaggcctctgcagcgctgactgcgtgccagactgactgcgtgccagactgactgtgtgccaagtctgccagtcctagggctttcccagagctaggattcccctctctgaggctggcttccagggccagcggcccagaggttaggggccgacgcccatgtgccaagagcacggctctccctgcaggctccgccccgtcacaggaggctccacggggcagcaagttaccttttcacactcctctcgtactcagtccgctggcggcacagctcggccctgagctcagtgaccagcccctgtaaggcctcggagcggcgcgcgtgttcccgggtggggctgtccggctcgctgggctcgctgttgctggcacccgcgcccgcctcgtccatgctgtggtccaggtccagggacttggggtcctcgctgctgctggggagcggggagggctccagggcccagtcggtgtgcagggaactgcgggcagacgagtcgctggcgcggcaggccgtgcagctgctgagtgagccccccaccgacgactcgctggacgaggccccggaccacgccatactggccacgctgggtatgccggggaccaggcccggcgcgggcacattgtcgtaggtggagagtctctgcacggagcccgagtccttgagccggtctcccgacgaggcccggcggtgtccgcgcagggaggacagcccgttcataagccagttcccgccggaggagatgatgggcacctccagggatgagccgccccccttcgggcttcccgatagggacctcggctgccggaaggaggacttccaactgggcagggtctgcaccttcttcccagggctgcaccggctccccggccccgtgggggctgttctggagagcaccgccacggccgccccgtccagggaagaggtcctgtgcgcgggcaggccggggccgccgggctctccttggctgtccctggtgacctcctcggagccccaccccactgcgcattgcaggcccccgcgcggggaggtgggcccttccgggaccggtgccgtgaagagctggctgtgtttgcggatgaggacggtcatcaggtgctggacgagggaagtgcctgccgggaagagaggcggagaagggccttgctgccagccactcggcccaggctcgctctgccagtcatggagaagctgcagcttcgtgggagctggccctgtccccagagccaggccgcccctcaagggagccttcatccgcccagaggaaaggaccacacaccctccaactccaggcaggacagcaggatggggccgcagaaccgccttcctcaggcacagagccgcaagcagggaggaagcactgtgcctgcgctcacgccctccagctggggtggggtgaggaagcaggcaccaaggctgcacggtgagcaggtggcaggttggaactggaacctgggacctgagatgccagaactctctcggctgccccacgtcacccctctgtgctgctgacaactgccatgcctgaatgtccacactctgggagcatagggctctgggacagggaatagagccatctttcctgtgtgggggcacacacatacaattgcacacacaatgcaccccgcccaccccctaaaataccccccacaatcacacgtacaatgcaccccatccacccccaaagtcccacacacacacacaactggacaatgcacccacccagcctccccaaatcccccaacacacaatcgcacatacaatgcccactcccgaaaatcccacacacataaaattacacacacaatgcactctacccagtttccccaaagcccctacacacacacaagtgaacacacaaatcccctacccagcctccccaaatccccccatacagaatcgcacaatgaaccccacccactgcccaaaatccgccacacacaattgcacacacaatgcaccctccgcagcctccccaaattcccccatacacaactgcacacatagtgcaccctgctcaccccccagaatcccacatacatataatctcgcacacacacaatcccccgtgtctaggccaaggcccctgagatgcagcccccagtcctggggactcagttcctacggtggtggggtgggggcctgcagcggaggtgggcagtgcaggaaggaccagggcatctatccagctgcctcattccctcctgccaccctcaccacaaaggcccgacgctaggaggtcccccggtaggagggagggctgagtgccagggtggactctcccactgaagttgactaggaatcctggaagaagtcaaggaaggaattctgaggccaagaacctaggtgaagcaggaactccatgaagcaggcagggcaggcctcctccctcaagcatctgtaccaccaggcaggtaggagcttgtgttttcctggcctcaaggggccctggggtgggagacccagccagggctgaccaaagtgcggacttgagcaaaagcactccgccacgtccctcaacatgggataagggcaagaacagcctcagctgtgggcttcctgtctgagcagcacgtctctcatgcatactccactggggacagtgttccatgggccctatgaggtgggctgtcttttctatggcagcctacacctgtgccctttgctaagtctggctgactggcctctggtgagtcccctcgcctctcttggcctcagtttcctcatctgtaaagtgggggcgattaccacagcacaggctggttgtaaagcctgaaatgagatgatacaaacaaagcacttggtagaagcttactgaaagcggctgctgttgctgctatttttaatcacttattgttatttatcatagagaaattctccagggtttgcaaagctgacatccaggaacctatgacaattgcttaattgtaaaagaaaagcaaacatgtctgtgttcaagggcaaaagtgctgacctctcccatccctccagcctcttccatccacagaaacccctggctattctaattgcacccagtgacctgctgctgcccatcgcagggcaaagttccttttttatcttatagctgaacctcatgggggtcgggggtgaggtctgcagaagttcctgccaagtccccagagatggagatgtgccacctgagccacccctcctgctggcctggccctgggctgggatggttccaaggacttgccgtggaccaagatgagcccagaccccggcagcacccagggccaccaggtacacctcccacttaccttccatgatggttactgggtcctctacctgtggccgcagaatgttaggtccaaaaacggttgccagattctggacactcatcttgttgacatttgagtatgcctgaacttcatccagaaacctgcaaagtaaggaagcagcagtcatcaaagaagcaagttgtgatgcccagtctcctgtgtgcggcctggacgcaccgccacacccctgctgagccctgctgcctgtgggcttttgcccactgggtgtagcctgcctctgccaggctcgatgagggaaggcttcccctggggcccaagagggccatcagaagtaaaagtcactgggacaagggcccaccgctatttgtgtgaaaggaggacaagactctgcaaattgtagtgggcacaaattctgggaagtcccagaccccagtcagcgccgcccctgcattccccttctcagtgtctaggatggggatacatgaagggttggggtcaaggggcagatgccggggggacaggatggcaagaggcacccaggagggacagagggtatgtcccttctggaattatctacccaggtctgtttaaaaccagctgctcccatgggactgtaagcttcgtgaactcagggtctgtgcttttccactccctgcttcgtccacgctgggttgaggctgtgcagggtggggaatgacccgggcccccctctgacaaggaagagttgcgtgtctcgctgtggggttgggggagcgtggagccagtgcaggaaagtgtggttccctcctgccaagccgcttacttgcagatgtatctgagcaggttgtaatttgcctgaggaaggttgctcacttgtttagccaactccagagtgcccttaggaatgaagaacagaatttcaaacaccggcaatgagggccctgactgttctctgactgcgaggaggggtgggcaaagagaagggaggtgggggctacggcagcccagccccaacagaccagagggctccaccacctccacctcccctcaaggagtggccagggcccagctgtgacctcctgggaagctaacttgcttccaaggagctggtgtgaggggtgagcctctacagggcccgtggaggaatgtcagggccagcactcagctcacttatcaagacacaaatatttgccagatagtgagccctcatctcccacatggccgcagggaaggcaaacagtccttccctggccctgagccacctggggctgcagaccagcacctgcacgggtggggacgggagggctggctcatctgtcctgggagccagctcaaattcttttgggaaggaagcaagatataaataaaagatgtcctggtttctgagcctgtgacgggcctgagtggcctgagtcgggtgtggggagtgtgagcacctactggtgtgacagccagagctgggcacaccggacccacccctcccagggaccaaggccgcagacaggtatggctccagacagcaggattccccagccctccccgacctgagcaggatgccctggcccctcccccacccaagcaggatgctccaggcccccaccacacccccaacacagcaggcctccacaggatccatgtgccatgaaaattcatgaaaagtcagagtctgtgtcctgagtctacaggctgccacccagccagcccatctcccaggagctatccccaggagccactgacctccccctcgtccttggtgagcagctgggcgcagctgaggaagtcctcgtacctggcgaaggggaccacgggctcggggagctcccgcaggtacagcttcagcagggaggccaccgtgtgcacgtctgttgtgctgtgggggggaagaggacaggtgtgtgaggcctgggatgccaggggacttcaggggtgactggtacgccctgacgccaaggggcagcctctggtctcaggtgcattcttgggcgcactgggggctgcatctgcggccagctgccctggtcaaggaaaggccagtgctgcttctgggagcagtggatagagctggggcagggacgactaagtatccatggccaggagctccagctcagggaccacccatcatgcctaggcacctgctcagaatccctgagtctcatgtctgtgtcagtccgtccagaacctgtcctgcgtagactgcgtaggactccaggaactgtgaagccacagggccctgcagggcacagctgctccaccctagcagctgccctgggccagaggaatcaagtgtgatgcaggtcaggttgcacaggggagggccctgggacatgggccagggagccccttccacaggcctggtggccatcccaaggtcccctgcaagacgatgtgggagctgcctgctctgcggtaggaacagctatcctgcaggccctccataggtgctgccaacccccagcccgagcttgccctctccactgcacttgactttggctggagtgggaggagctgcatcaaaggcgcccacaatgcagggctgctggctccttgttggggagcaggtatccggggaccaacagcaggagcaggtcggaggtcaggccctttcctctcttcctgtccacagtggtgacacctaggcttctaagctcatcaccccctctccagtgccccaggagtccactccaggcctcagtctcccgctctggctcggagctgccaaggcagaagtagaccagttgtggatggtggtggcaatgggcctggcatagtccttccctgggtcctgtgtggggtctgcagttcaggtcctaaacgagagccttggcatctcctccgagcttgcgttccaagccgtatatgggccccaggttgttcatctgcttgtctagaaccatggacttaaaccctgggctgcatttccctcaggaaagatgagacggggccaggagactgtggctgtgccattatgctatcacctgatcccggatgaatcccaggctaggctcactgagataaataccttctggccctgacatttgggattctggggttccatgtatccatatgcaccccaaatccatatacctggggcccctccttgcctgaggctcagtgactcttggtctggctggatccaggcagcccccatcccaccctccttccatctccagccaggcatgctgctatcacaccctcctcggccttctcccgggccatgttcctggccaactgccctgggtacccaggcttgagcccagcggccccttccccactgggagcccgtggcttcagtggcagcctgagtggagcgcaagagactgggggaagggcaggaggcagggaagtgtggttggcagccagcccgtatgtcttccccttttctgcagctggggggatgggagcatttctgccctgggtgagtggacacagagccacccctcctctgcagacctgcccggctgcatccctgccccgcagggtcctgctgcttggccctgcctgaccccctatccgctcagtacctgagctcttacttcctttcctcgtccctccctccctccctccctccttccccactgcagtgcctttcctccaacagctgtcaccaggccttttcttgagacttttccctaaactgctgtccccttcccccctccaacaagcacccaaggagaactctgtacagcccgtggtcctgtgggcgcctccccagcctgtgggcctcccagcatgcggcgacattagcgcaggcggagggtgggggcaggggtggggcagaaagggcagcagctggtcaggggacgaggtgcctgccctggggacaaagaggccctggtggtcagtgcagcccgcagcaaggtgaccctccatctgcaggttcctcgtcacctctctgtacccagggaaccccccgcccacgccaacaccggcatctatgcagaacacgccatgcctccagcctggtcctgactcgcctcactcccctagagtccgtttctcatcacccatccccacttcctcgacctgccccccagccgggccgcctgcttcaccccacctgggtgtccgcagggctcctccctgagcagcccagccctgccatctgcagcaccctgggaggttccctaccactaggcccgggactggtgtccctggtgtttacttgttatctgtcaagacccaccccccttagaatttctaatgcatgtgggtgcccctccacccctaggcctcccagtgctccctccctcaaaggatagcagctgagggagtaaggagagcctggcggccaggagtccatgcagccctaggctccggcccacaggaggctgtcctcagagctcagcagcagggtggcaacccgggagactgacagcccagtgcccaggggacactgtgctgggaaggggcaagtatgggacagctccaggcactgaggcttccaggcctggtgaggctttagcagaagagaagcccaggacctggggctaaaggggaccttcttatagagatgagcaggaaagtgaggagggggcttcctgcggaaggggccaggacagaagccaacaccccagcaggcaggcaggctatggccttggggagagagctccatcccgggaccctctgttggaagtgggtgaggaggagaccctctgttgggggtgggtagggaggggggaccttctgttggggttgggtgggaaggggggcctccctcaggggtgggtggggagggcccctctgtgggtacagctgcagagccagaggagctgccatggaaatggcagaaagtgggaaggatggcctcagataccccaggaggagtttctaaagggagaggaaaccaaagcccagggccaccgtggcagtatgggggtcactgctgagatgggggtggagggacaaggccaacatgcccaccatggagatggccctcctgacacaattccagaagcagggtagaagcagccagagagggagaaggcagacaggggagggcctccaagacatagggaaggctgccccaggctgctgggaggccgagagtcaggtctgcatggaacccaccctagggtgcccagctgcctctcaagggggcttcagcaggcaggccaggtggagaaaggaggctgagcatgccaggaaccacaccttgggagagcaggtgtgcccaggtggagacccccccagcaggatgggagaagcttggcagtgtgggtgaggcgcagacggcctgtgccactccagggagccccagcagagtttgagtaggggagtggcaaggtctgatctgtgtctgcagaagcccctcaggtagcatcaggcactagggcagagcatctgatcctggggagcttccaaaagtctcggctcccaggccttacccaggtgacattatttgaagcaatctgcaaccctaacgctgagacacaggatggaagaggcctggctggctgaggttcagaatggacgacaagctcactgagcgtcaacactgggatggagcttcacaaagctccagaggaagggtcccccgtacctccctgggtggagcaccgctagggaacagtggtcagtcctggactccacatctaaggagaggagctgacaccctcccctggctgcagtgacgggcctgggaaagagctgaggggctgagtgttctgcccccagaggagaagccctgggaggccagggctgcctgcaggtcctggtgggcccatcctggggcagatccaagaagacagggcataagccccatggagggtagtttttcctgatgtagagagaactctatgaaaaaactgccccataatgggtgggggcactgtcaggggaaacagaatccccaaacggccctaggctgggggtatagttggctccacccaggggcatccagggcctgggtaagcccccatgatgggtaggatggacatggccccggccccagagcagatggaggagactcgctctcctgtccccagaacccaaaaggaggggagccgagctgctgtgccatcttgccattgatagagcctgggggtaggtcaccggaggaagcacggccaagagacagaccccgcagaaggcctggggtccggatgcagctgcgcctggtcagtcctcacatgggagccagcagaggtccttttcttcctgcctgggtcaggtttattagcatgtgcaggggaggcaggctgtgtggatgtgagctggcctcgtgcatggcaggcatccatcctgagaggggaccccgggctggcggagtgagggtgtgccctacactctgcccactaggagggctggcccaccatcctgtcgctagcccacccctgcccactggagctggtgtcctgggcaggagcccctgcaggaggaatggacaaatggctccaccttacccccgatcacaagctcacctgtcaaacagtggcttctccccacagtcgaaggaatcctgcaggtccctcaccaggttggcctggcctggcatgcggaacagcccctcctcagtgagcccgcgctcccggatgaagtccacacactgctccaccagcaggggcgccaggcgggggccatacttccgctcgtggtggactgtttcctctaggcgctgcccaaagatccctgagcacagagaggagctagtcacaccctccaccacccagctcagtgttgggtgctcaggacaatggagggcaggcgcactgttagggctaaaggtggctcctcctcaggaagcaaattacacactgggaggatgcataccagaaggctgtgccctggccgcccggacacatgctgggaggatgcacaccaggaggctgggccctgggctgcctgtggacagacagcaggagggagcagtgagatggtggtgtgacctggccatggagcttgcccaagccaggagcaaatggcccttgggagcgttcattatgcctgtcattgattggttttgcagtcattccaaatgagaagccatccagtgcccatcaacagcagatctcctgtgttctattcttaccatggaacacagtgcagcaatgagaataaatgaggcacagctcactggacaagacagatgacatagtaatgtgaaaaccatagtcgtgactcagcatcaatcattattaggaaaatgcaaatccaaaccactatctgataccacctcacacccactaggatggctactatcaaaagatcagatagtaacaagtgttggcaaggatgtggagaaactggaacccttccttgtgcactgctggcaggatgataagatggtgtagttgctgtggaaaacagtatggcagttcctcaaaaaattaaaaccagaattaccaataatccctcccctgggtatatacctaaaagaattaaaagcaaggtctcaaagagatacttgcacacccatgttcacagcagcattattcacagtagctgaaatgcggaagcaagccatgtgtccatcaatgaatggagtaccaagacgtggtatttgcatacagtagaacttgattcagccttaagcctgaattcccttaaaaaggagggaaattcagacaagtgataaaatatgggtgaacctgagaacattatgtgaagtaaatcattcacaaaaggacaaatactgtgttattccccttatatgaagaacctggagtattcaaattcacagacagaaagtagaatggtggctgcaaggagctggggacaggggagatggcaagttagaattgaatgggcacagagtctcagctttgcaagatggaaagtgttctggagatggatagtgctgatggttgcacgataattgaaatgaatgtaatgctgctgaactgtgtgctttaaaaatgaagacaggaaattttatgctaagtgtattttatgaaatgttttaaaaattagaagacaaaaaaaatcatcagaaacaaaagaagccaaaccccagagtgcacactgcatgactccatgtatgtaaagttaaaaacaggtcaaacgcatctgtgctgttaggccgggacatggttcccttggtgggtcagtgactggaaggggctcaaaggcttctggggtcctggtaacactgtgtctctcccccagcactgcttacccagttatgttcctcttgagaaaattcactgaactgtacacttatgacttgtatgcttttctgcatgttactcttaaataacattagcaaaaagaaagaaaagaaatcagagagagaatgatctaaaacaatacatgacaagacaccaaatgaggaatagagggagagaggaaggaggcagaggaacttctgagaaaatctatgaaaactaaatatatcactaggctaagaggttcctggcagcccaggcaaagaagggaaggagttgagatccataaagctgtctacaccacggcacagtaactggagaaacagacttgtgccagcccctaagctctacaaggtgcgtgcctgactctttggagtgtctgacattattcacacccactgtgcagagaccttccctgcagggtggcttgtggggtgttccaggggcaagatgccaaagctccatgtccaggcttgggacttctcagagacctgggcactgagccagctaaaagtggggctccatttgtcttacttagcttcccacccaggggctattttggaataagatacatcggtccctgatacagtgcctggcacagagcagaacacagtaaatgctcctcctcaccctgcttgacccaaaaacaaagtgtataaaacctgaaaggtgaagactcttcctttgagaacacatgcccgcgtgggctacacctgctggataccagcaatgctttagggagaagtgtgtacgcacatgtgtgcatgtagtgtgggcttgtgtgtgcatgtgtgtgcacatgtgctggatgtgcgcttataaacgtatgtgcatatgtgtgcttgtgggcttgtgtgtgcatgggtatgcacacttcggggtggggggggggcacctgagtgtgaggagagtgccgaagtagctacacacggtgttgtggtgccaggtgctgttctgagcattttacactcatcagcacatttaatcctacccatctgataacttagggactgtcactatcactgtaaccatcaacatcattatcttgacttttgcctgttcagtttgtaggatgtttgaacggagaggcatgggggcttaagaatgtgcccaagttcactcagcatgcatgacagggacaacggtccaacccaggcagtctggctccaggtatagggaatgtactcagccacatggctgcttggcacccatgttggtgtggagatacctatgtgaggcatcccccaatccagcaccagcagttcctgaaaacatgggtcatgtgaacagacaacaggcagaggttgcaatactaacacgaagggaaagctgctcccacctgggacctggtgggcaagaccaggcgcccctgcccagaaatgggacccaaggggccattcatcagccttgagcacaggaggtgatcctgctgcaagcttggcctgctagctgccagggacagctgtgagaaaccagtccgaggaggctccagggcccaccactgacagcgtcctggcctttccaccatcccaagagtggcctgggctggtccagtgacactgagcccctgctgtctctcacctcagtcagagctcaacatctgatgcctaacagtgggccacacaggtccacagatgtgcctgtttagctcacatgatgtttgaaacatttttaaattagttatttataatcaagagatttcatatacaaatctggattcccagcttctcttaaaaaatccagacgtggtgacaccaggcctgagttccaaaaaaagcaacaattgcagagctcagtagcatctgtgcccttttgataggactcacacttgctacttctccgcagtctccaccatcccctctcacttccaacctggcccatgctcctctcatgtggtcttgacaggtattcgttcacctcttctgctttgacctctggggcacagacttcccccaaggacactggggccaggataagtaggaaaggtagcaatgggaagctacacctctcaggaccagaggcctctgctaggacctcaaatgagcaggcagagggcatccaggaggaagtgcccatgggcagagggtcccatgaggggaggggctgacctggcagtgcccctggtgcctgccgcctgcctcctgcctccctcccctttcctccagctctgcccactgcttgagtggcatgaatccgtctgccttcatgggcctgtgagtgggtagggccttctccctgggtagcgctttcctcttcggtctgggcaaatttcccactagcccttggaagaaagctcagaagtccctgctacgtgagctgccccagatcctcccttcagctttccctcccctctgtcacagccctgcctgccactactccagacagtgtgaggacactcccctctgctgggttgctgaactgcccagagccacatgctgggcttgcagcagaggccaaggagagccagtgaaggaggggaccgagctctccagggccgccacccatctcaactcacagcgttcagccccaccctcagctcacagctgactgaaggccacagtcaaggaagagatacatggggaaaaaattccaaaattctctctggaagcccatggagcatgggtaattccacccagccatctcttggctccagcccggcctgctgtcccatctcctacccccaaaactcctgctgtctgtctgtccatccacctttccataacccctatactttgtgcctggccccactctaggaattagagagctgccctgaaggctgtaaacatataaatctccctggggcctcccctgctccctgttcccccacacacatcgtcctcaggataaagcccaaacttggcaagcaggcaaggccctgccctactccctccaccagaccctaggggtgcagagcctgggccagcccaccatttgtacagtgcctgcacatccaagcagctcccagccccagcacaaccactacccttctgctcccccatggcgccttcctgaacactttcccaaaacagggatggaagagccaggaaagggacatccacagggtcctgggcacttctagagagaacaggttcagggaggaggtgatgctgaagccaacgtctaaagatgagcaggaagaagccaggtaggcgggtgggggtgcagggcacatgatggaggagcatgggcgtcagagggcaggggtgaaggagcatggttggcagcaccctgccctggcatggtggggctgaggtggggacacgggaaagtaggcgatgttcaaggccaaaggtcacagagacaaagattctgggtctgcaccagcactggtctggtggacgtcctggctaacccactgaggagaggagctgcctccctttcctggggctcagtctctccatctatgaaatctataaaatgggaggatcacacctgtctttagggggtgctatgagggcgagacttccctgaggcccagcccccaggtaccaccaggctgcagactggccccacattcccagctggccactggaacccttggaggggagctgccaggagctgtgaggtctcattccagcttagcctcccaagaggcttccttccccgcggccctcctgtgggaggcaccctgtgctggggcttctgggcccggcctcccttattaggggccccaccaatccctcccctcatcagggtctctcaggagcctggcagggcctgcccccgcctggctgaactccctcagctctcctggcaccctcggaggggagccttgccaaaaactagttccagtaggtttgtcagctccctggaaacccagccatcgtgtgggttcctcgaggtcccagcccatgctctttacagagcactggctctgccaccgcaggggaaactggcagaggctgcctctcctcttgatgaacttgctgccaggcctcccccgccagcgttcccctggcaaagccgtccctcactcccctccccgggaatcccacaccggagaggaagcccaggcagagcagtccgctggctccaatccgcgtcctctatgaccctgggcactgtcctaagcctctctgagctgggcttggccaccttccggggtgtgagcgtccacgggagatcgaccacaccaggcacccaggagcaagtgctttgaaatgcggctttctccggaccttgcagggtcaattcctggacaggttctgcctgcccctgagtcccaccccgaaggccgcatcagggaagggagacctgggattccctcttggagctgatcccggagcagagtgcagctgcgcagcaggtctgcttcagtcatatgcctgcttttcactcttacaggagcgggcaatgacatagtctgggaagaggcacaatgaggaaagtaattctaaaattctctctagagactcccaaactttgggtaattgggtaattccacagtttccctcttggctccaggcctttctgctctcgggtcccctgtaccccaaaactcaccatcttccatgcaaccaccccaccctttgtccgtcagtgcagggactcactggccggccaactctgtcacttccaggctctgcgctaagtattagggagcttcagaattgcccccagggctgtaagcggtaagatccaccagccagccggcacagctgaaaactctcctgctccccacccgtccaggcctggaggagcacagtagaggctaagctcacctggaagggtcctgccctgggcagtccaccccagggcagaagtgattccctcctcctggggccgccggtcccacaccccttcctgtggcccaggtaggcttggggtcagagcccgaggctcggatcccgctgtgtcccctccgtagttcggggtggggagggatcctttgcaagtccctgcgcccccccccagactctaagtcctcgtctctacatgcgggacgcccacagccagcaggagattgaaggacgcctccggtccctgtttcttccctcggacacgcacgaccctcgccccctgggaaccgtcccgcagcaccagatccgcggtgacacccaaactcccccaggctccccgccgacccccgcgagacgcatgcgcggcgctctcgcccgctgcgccggtcccagcttcgagcgcctctatggcccggagacgcagcttctctggcgggcccgggggcgcccgcaccccgtcccgcccctacctggggcggcgggcgcgcaacaagcgggcaagcggcaaggcggccgcgggcaagcgctgcatcccggagtaggcccgcgcggccggcatcaggcccatggcgcgcctatcgcggcggcgcggcggcggctggaatgcccggcacgcgcgcaggtagcgtcttgcccgccgcccgcccgccccggccagcgccgccccaggcccggaccctgaggcgagggaaggcccaggatctgtgagttgcctggaatgccacgcccgaagtcggcccccgtgggggatctccggtgtcaaacttcacaccctttcccctaatgccccacgttcccgggcaccgcaggaatcccttccctctttgcccaggacctgctttggagcgcccgcttaacccttcgcctgggaagcaggtgttccaggtgaggcaatggaggtccagggaggttaggtaactgagtctgggtcacccagcaaggaggaggtgctggcttcacagtgggggtccaggctccaggcccttctggcctcttcctgcctgggcatcctagtgccagagatattggtttggacttgacatacagtatgcccctgagcagtctgaggggtattagcttccctatattacagagaatcagagaggttgtgtgatttgcctaaggtcatacagctggtgatggaccttcattaacacctacatgatctttctgcaaagcctgtattcttcttgggttaggtttctgagaccagcccacaatccccatacttccaaagggtgagggctggaatgggtacaccaggaaggcaggtggacagagaggcacggctaggggcaatgcaacgccagtagcagggatgggagtcccaagggtaggagggcagaattctttttttttttttagcttgtactgaatatttatttcacacagtagctgaccaaaggtgcagacataattggagtaacacttgttagaagaaaaatactgtgagttactagtgagtccggaatataatacttgaaaaagaaaacatggttcagcaagttatgggtcaagtgataatcagggtgacttctttctttattgaatattattttccaaaactctggaaaaatcgtatgtgaaaataaatgcatgcatattggaaatttctagtaaggacctgctagagctaagcagcctgggttgagctaagcctgagtttaagaccagctttgtcatttgcaaggtgcttactctgggaaaagttgcttagagggcagaattcttaagggagggatttgcggccctggggctggaagaggctggggcccttcttcaagctggacgtgcagagctgggtcacgcctcttgctcattctaggcagagcctggcctagggtgaaacaagccaggcactcaccacaggggcacaatttaaggggcacccaaaacctcactcagtaactaggataaacactttattgtaatacttttaagaataaatattaggcaaaaaatctttgatgaacaaaagatcaaagttttcaatacagaaaggagcagctatgcacttgcacaggccttgagggtgagtgcctcccaccccaatcccaccacattcctgcctttatttcacatgtttgcatttgaccatggatgtggttggctgaataatgcccttccccacaagatgtcctgatccctggaacctgtggctgtgttatcttacacagtacaagagactttgtaggtgtgatgagggctggagaggttaacctgggttatctaaggggccaggtgcaatcataggggttcttttaccaggaaggcagaaggaagtttgaccacagtggaggcggtgggggcaggacagaggcagagactgcagtgctgaagccgcagccaaggccttgctgtagcccctggaaggttaaagatacaaggaactgcttctccccatgtcctacaagaaaccagtcctgctgacatctggattttagccttagaagactggttatgacttctgacctccagaactagaagataatcacgttgtgttgttttaagctgccaaatttctggcagtttgttagagctgcaatgtggacctaatataaggatattttagtattcatgttcattttttaaaagattacaataaaatatcttgattactgagtttttttggtgcccccttacattttgtgccccaggccagtgaggatccctagtcctggccctgacactaagtatgggggctaaggtcctcaaaactgggagtggggccgcggagctgttttctccctccccagagctcaggtgaacatgagggtgccagggcaggttggtgcagggtgtcacaagccaaggaatgtctgccctccacctaccaacagagcctggcattcccacggcccagggacctgccagctctgagcagccctgtccatgttaaagagcaggggccaagggctcagcagaagctctcaccaaccaggggccggcaggcttctctcaggtgggcaggcagggtctgctgcccacatgttttctctgctctgagccatggtttccctgcctgtgtcttcagagtcagactggccagtctctgcagagtgccctccacccctacccaggagccccacatggctagaggcctgcaggcaccacccattagaaggctccggcaggcactgccacattgagctccaggtgaagccctggccctgccaatgcccaccccacctcaggggtggtttttagctgtggggcctgttggggatgggagtgcagagacagtcatgagactgccttctcagggcagggctggggagctgacaacctgagtctgtccaatcacacaagcaacccagttaacagttggcctcttcactctggatggtctttgtctctgagctgtgtgtacaacagctccctggctagggctgggatccaggaccttagggactgcctcttccttcagtcttaattatgcccccctccccaaccaagacaactcagatctagtgggtagaatgcgctgaggcctacctggcaacagcatccagcgatgagcttaccctggaggtgggctgcgctgcccccagccccactgtgtgttgttaggtaagttgctgaacctctgagtctctgctgcctccagattgtaccaaactcctggcaagggcagcccatagccagtgtgagctcccttcctcttctctcagggtgtgtgggctgaagtcctccagggccacttggaacaagctgagagacaaagatcccaaccctaggacaccctgaggctttctggcatcctgctctctacagcaggcagccagcacccaggctctgcactccagccgactaggttgaaatgccagcttcccacttatttgtggtctggacaaaatgctggagcctccttgattctgtctcctcaccaaaagtgggatataatgggactggtttcacagggctattgtcaggctcagcagggacacagagtccaggataggaaatgctggggtccccaggggttcatccccatcttatcaataatggagacaaactcttttctggttctgtgatctgaggtctattgaagccagactgaaaccaaactggccaagctgatgggcatttctcatcagagctgctgagaaggaagggcttaatgaaccagcaaggtggttaaaagagtgttgaacgttagcgtcctgacctttgcaggaagcagtagtgacagccccctgtaaatcatcccgactagcttaccaggctctccctagataaggcagctgctcgggcctttgttctggtaaacagctctgtggctgtcccatcagcaggggtgggggagggtggctgtggctggaggccatttcctctgccttggggatccaagttctcaggctcctggggctctggcaggggagaagccttgagcgctgcaggggaaggaggcccaagtgtgctctgaacaccctctatacccagaagaggccaggcctgccctctatgagcctggacaggatccaaggtccatagggacatcttctccacttgagtacatggacccttagggcccactagaatggatggaaggcaccagaactagtctcaagtaccccttctgctggcttagtgacctgaggcctagcccaggtctgcaagagtcctttctctccccttttggaagggctgcctggaaaagcccaggcccactggccaggcaggttgacattcacaggaactagaaataagactgtcttcttgaatctcccaggagggctgggatatagagcaagcagtgctggggagaagtggtccactaggaccttgggctctaccactggcagcctggcctgggggtaatcacctttcactctgaatctgattatgcctccagggcttccttttagagatgtcattccatcaaatgatgaccactaccagctaacaaggttgcatttcatcccaccaggttgtcccaaggttggatttttttccatgtcacatgtcctgccctagggcttcagggagctgtatttctcccttcttttttccacccatgattccagaggaacccaagggcaggagagttgactcctgggggtctgagaaaagcctccagaggcctgtgagattcccacacagccaggccagggcagtgcagttccgatgatgaccacaggcctactgcctgtctccggcccccatgccccgccccagcaccaagcagtcactctgggcagggacaccttttcccagctgggctcctagccccaagactgccttctgcgctgccactggtaaggttgggacaaacagcttcagggctttgcttggcggtgcctgctggccatagtggaactgttaccacagtgctagttagcaccagtcccagcccccagacttctgaatccaactgcccgctcagcatctccactggtttaatgactcatagacacctcaaacctaaacgtgtccaaacagagctatggccttgccatagcctcccaaaccagctctgtgctaagtcttcccttcttacttcataacaactccagcctccagatgcccagccagacaccatggagttagcctccactgcgcccttcctcacatccacagccaggagagcttatcatcctacttgcaaaatagatttggaatctgatcactttcactaccctgaccacagggagagcacccccttctcttgcctggattattgcaaattcatctccagctcccccttgtacaactctggtcagcaggcagagtggtcctcttaaatgatgtattacatcaagacatttctcggctcaaagccctccaatgccccctcctcatttcagagtaacagcagctgggccaggtgcggtggctcacacctgtaatcccagcactttgggaggccgaggtgggtggatcatgaggtcaggagttggagaccagcctggccaagatggtgaaaccctgtatctactaaaaatacaaaaattcactgggtgcggtggcgggtgcctgtaatcccagctactcgggaggctgaggcaggagaatcgcttgaacccgggggggaagaggttgcgttgagcccagatagcatcactgcactctagcctgggtgacagagcaagactcagtctcaaaaaaagaaaaaaaagaaaaaaagagtaacagcggctgggtgtggtggctcatgcctgtaatcccagcactttgggaggccgaggcaggtggatcatttgaggtcaggagttcgagaccagcctggccaacatggtgaaacccctgctgtactcaaaatgcaaaaattagccgggtatggtggtacgtgcctgtaatcccagctactcaggaggctgaggcagaagaattgcttgaacctaagaggcagaggttgcagtgagccaagattgtgccactgcactccagcctgggcaacagagcgagactctgtctcaaaaataaaataaaataaaataaaacaaaataaaataaaataacagctagagtactaaaaggggcccaggaagcctctaccttctggccactcccatgtggctcccttcctcactccctccagcccatctgcctctgtgctgcttctagaccacatcagatgttctgcttttgcccaagctatggcgtcagtctagcacacttccactagatgtccccttggctcactctctcacctctttcaacaccgtatgaacaatgagataacacttcatacctgttaggatggctattaaaaaaaaaaccaaaaaaaacagaaaacaagtgctggtgaggatgtagatgaactagaaaacttgtgtactgccagtgggaatataaaatggggcagccactgtggaaaatggtctggaggctcctcaaaaaattaaaaatagaattaccatatgatctagcaatcccacttctgggtatataccccaaataattgaaatcagggactcaaagagatatttgcaccctcatattcacagcagcattattcacaatagttgaaacacagaagcaactcaagtgtccatcaatggatgaatggataaacaaatgtggtatatccatacaatggaatattatttgagcttaaaaaagagagaaattccaatattccacatagatgaaacttgagaacattatgcaaaatgaaataagccagtcacaaaaagacaaatactacaggattctacttacatgaggtgcttagagcagtcaaatttataaagacagaaagtagaatggtggttgcccagggctggagggagaaagccagagtttcagtttgggaagatgaaaaagttctggagagggatggtggtgatggttgtacaacagtgtgaatacacttaatgccactgaattgtacactgtacactgctttcttccctgctgagtcctctgcctgcatgtgacaggtctcaataagtgtttaatgaatgaatgaggactatttagtactcagagaacgctgaggactatttagtactcagagagcgctgagcactttatgtccattttctctcttaattcttatgacaatcctgcaaaaaagatattattcttcctattttgcaaacaaggacacagaggtacagcgaagataagaggtgtgccaggtcatgcagcaagcaagtggcagagccaaatcacacctagacccaagcctgttgccaaagcctcactctgcctcctctcacacttcaatgcaatgggcttggctaaaccccttcctatgcatataaattccaggctttaagggggcttgcagactctctgcagacaaccaggcaagggatacacatgttcaagcacccaccagatgccgaggcagccctggggacccggtgactattgtctcccttctctctcctctcagagagagctggcaaggaggtactgcgccatgcatccttctggggctgcgttccctgaactgggcgtggaagttcagagatcagtttgaggagtattggcctcttaacaatatcaactcttctcattcctgaacatgggatgtctttcttcttatttagatctttttcaatttctttcagcaatgctttgttattttcagaatataagttttatacttttttttgctaaatttatccctaagtattttattcttttggatgctcctgtagatgaaattttcttaatttcgttttcagtttgttcatggctactgtacacaaataaaattggtttgtatatactaatcttgtatccttcaaccttgctgaatttttaattaattctaatagtttttttgtactttctgtacacaagatcacgccatctgcaaacagagatactttaatgtcttccttttaaatcaagcttcattttatttcattttcttgcataattgacctggctagaacctctagtacaatgctgaatagaagtggtgaaggcaagaatccttgtcttgttcctgatcttggaggaaaattagccagtcttcctcgattaagtatgttattatcagtgggctttttggagatgccctttatcataggaattcccttctattcctagggatagaatagaagttcacttctattcctagtttctggagtgttttaatcattaaagggtgctggattttataaaatgctttttctagtctactaagacggtcatgtgtttttgtcctttattctgttaatatagtacattaattgattttcagacattaaatcacccttccattcttagagacgataaatctcatttcatcatggcgtataattctttggattcagcatgttaggattttgtggatgatttttgtatctatatccataagagacactggtgttccagcaataattctctgtccctcctacaccatcaatcttttgcaatgatgctttgtcttccaacttaaaaaaataaaccaacttcctctttacctcacctcctcctccagctgctgtccccatttctctctttcccttttctgcaaactttttgaaagagttggctatgctgacactccaattcccctcctatcatcctttctcattcccactattatcaggcattccacaaaagcccctttgctcaagtcaccaatgactgctcagctttcatcctctggttgatctatcagcagcacttggctgcagttgatcactgcccttgttccttcacttggctcagggtggcttctggctctcctccctcttggggcttgctctctttctcacccctctgctgtccctccactcgctctgtgctgtctcattcagccttatgacttcaaaccccatctatgtgctgatggccccctaaatactctctctagcccagtcctctctcctgatttctaggctgaaatatctacctgcctacttgacatctaaacttgagcatcttataggtatctcaaactaggcccatatcttccttccaaatagctgcagttcccgtagtctttctatctcagctaactcattagcttcccattgcttagatcaaaacatcccagaattatccttaacttctctcattcattctcatacacctctcatccatcttagcaggggaataccactggctctaccttcagaataaatcaagaattcaatgacttcttatcgccaccaccactgggccaggccaccctcacctctcacctgcactgttgtgtaaggagctcctaactggctttggtctttcctcaacatgacagccagaaggatcctggtagaagatgggccaggttctgccacttctctattccatgccatgaggtgctaacagctctaccatgatgacaaggccattcattctttggtctctctcctcccctttgcccactctgctctggccacactggcctccttgctgttcttccgggatgggccccctacctctgcctgtgctgttatccaccctttctttccttctactcaaaagtcaccaaaccctaaccctatctcttgtgttcccctccctgcctcttctgtccccactgtgcccaccatctaacctgccatgtgcctgctcagctggtcacccgcctcctctactagcacgtgagaaccatgaggccagtgcctgtccctccagctcgctgctgtctcctcagcccctagaacatttgcgagtccattgcaggttggctgaatgaccagatgaattcccaaatgagaggcactccagctgtggccacagcttggtgggctgggcaggccaccagcagtgaggctcccctgaccactggctgctcccacttctcaaggggatggctgggctgtcccatctgcagcaggcacgccacccactcctgtctgtcagaggtggcctgccggtgccagaataagcaccccaggaagggctcaggggctctgttacaaaacagtcaaaaaaggactgatcctctaagcctccttcccaggggatgcaagctaataacagctctgccagaaaaccttcaggggccgactgagcccacctgccagcaccatgcatgcccagacacgtctggcatcgctaactcctgagatttctgcatttcctctgtactcccgggagaaaggagataagcgcctttgatggcagttcctgttttaatggttgtgagttcttcagcacacagcctgggaaggcagataaatgccaggcctggggaaggggtcagtctagggtctatgtgggattctgccaaagatccccaattctgggcaagcacagagggagatggacatgtggccggggagccaggcctgctgggtgcaggtcttggtgcagctcttggacgggctatttgggccaggaccaagcacagtctttgaggccagaacatccacctccacttctcagttctgcccccttgctggctgtgtcatcttgggcaagtcatctcacttctttgacccaagtttctccctttgtttcatttattttttatatgcacacatctagaaaagcacttaaagcataaatatgcagataaacatgtcattgtaaaaggaacacctgtgtaactacccaagccaagctagagaacatttaagatatgtatgcccctctcccatcccatcttaacctcttccctcctccctactatcctgactttcatagcattcatttctttgcttttctttatattctgttgcctatctatctataaataacaagtttacttctgccctgtgtttcaactttatataggtagataatacaacatgttattttgtttgtttgggtttagttccacattgtttttaagattcatgcatgtaggtggcactgtagtggattcattcccattgttgtggagtttcccactgtaagactgagtcatagttatttatccattgtattgttgctgggcacttgggttagtgtcaggctatcatcaataaggctgccatgaacatcccatgtatccaagtctcctggcatacctgtacacacatttctatgtaggacatgcttcatatggaattgctgggacacaggtgtgcacagcatcaacttcagcagacactgctgatttccctagcaatatgtgcaagtttctatagctttctatcctcatcacgacttgaaactgtctttttcattcagtcatttagtcattctggtgggtgcatacaagtatcccattgtgatttaatttgcaattccctgattactgatgaggttgtgcgcaggagcctatgttcactggtcatgaggatttcttattttaggaaatggctgtccaagtctcttgcccacgcttctgctgccttgtctgtttttgcctcattcatttgtaggagtttggggagtgagtaatttgatgaccacatgtgttgcaaacgccttcacccaatgtatagcttatcttttcattttcttaatctaccttttacaaacagatgctcttcattttataaaatataatttatcaacaatttcataatagattagtgtttttttgtaactcatttaaaaattctttctctaccccaagattatgataatgttccttccctggtgctcaaaagtgccacctgtcatacatcaaagtccaactatgtaagattctgcttctgggctctattctgttccactggttcactttcagcaacctggaaccaaagccactgtgaggctgcagaaatccctgggtgggctcagacctttccaggccattaatctagggccctaagtcaaatgtgctgcaaccttcagggatcaaggagaccaaggctgacagtgtgatatcattcatgaagcctgagagaacaactttcactctcaacattatattgactcttccttgtgagggatttatcattcaatgaaaggtggtcaggtagaccatagccaggggtgggagaggagagtgggcaaacagaggagcaaaggaaggggctcagcccatgtggcttgtgaaatctggagactggcccagagccccaaaaggtgagtccctgcccagactgtgtgctgatcaaacaccatagggagaaagaggacgtccatagcttgtgtggtcagagcccagccagctttcagactcccagtctccacattcagcagggagtcggtggccctggccccaatgccatggtgatcccattatgaaagatcttttcatgaccacttcatatggacaccgacctagagatagcgactgcacggctgggagtcacctttcatttctctcataccccatgtccagaccataggcaaaacctggcagctccaccttaaggatacacctgcagctggccactttgcaccatcagctgcatgcccaccccatggactctcctggcctgctgtgtctactgctgtccctctatggtccactcctcatgtggtggccagggcaccttttacataaatctgactcaggtcctgtgtgtctcctgctctgagctctcctggtatcccactgtatacagaacaaaataaaaaatccccaccaggaccccaaggccttggtgaccactcttacctcaggccctcccactcgcctggtcttcactccctcggggccccggccttcctgacatgcctcgtgttcccaaagctcgtccctacctcggggccttcgcacgtgtccatgtctctgctggaatgctcttccccagcatgcccctggctccccgttgctgcattaagcctgcttggccactccacctaaccacacccccgccgtcctctcactgagcttcaatggctttgtgacatgtctcacccctggacaccacgagacacatgtccttgtctaccatccctcccacagagaatggagatgagggaaggcggaggtgtggcctatcctcatgaattcctcacccctggaatagaatccagtacatttagatgtctaatacacagttttcaataaaggaggaagtgagtacacggcagccgttgggtgactcccgagggctggcagtggaagggccagcctgctgtgagaagcacaggatgcagccagcaagtcctcagtgagcagggtctttggggctcaggacaggcagggggcatgattacctggaggcaagggttctagagggtgggcatgcgatctacgggcagtacctccgcccagcggggcccagatgactcggcggatggcctgcacccagtcctccatgtcacgctgggagctggccatgagcaggagcgcctcggggttggccggcaccttctcccgctccccggcaccacctgcaagacagggagacacaggcttacgcagggtccctgcccgcagcacactctccaccgccggcactagtcagcattactccctgtgggatattcccaaagtccttccagcaacagctgagctttgcttttatctcacagtccatccctttcacaactcatatctctttctttggagtcttttcccattttctcttttttcccttcgtctcactttgctattttcccatgccaaaatagaaataatttaatgcactccaggacactattagaaaataaagcatgcagatgttaggccagctcagagactttcagtgccccagggtggcctcactttatgctttgtttcaaatcaattttgcccattttaagaacacagttaaacgtcactatgtgcttttaactttggctcggagattagggcctcccttccccatcctgaagacaagagtctccgtatatattaaggtcacagaggctggatgttaaaccaggatgcagcacagcaccccagaattctccaccacacccatctcacggctagacagtggatcggcacctaaaggcagaaggatcggaaaactcagacagttgcttgtgaactgactttcccctctttggttctcaagttttcatgtgtaagcaaattgatctttgggaaatacaaaaaactatttatactgaacttcacaggtaattttagggttttcaagaatgagtttgtctttatacatcctaccccccgacatccctggactatctgccagtagggtgtgagatccacagacctgtgttcccatggggtgggtgggcccaagccacgctttgctggagcctgtgacccagggatggagagcagacaggaccagcgcttactgagcacctggtacgtgcctgggacacttctggtaagcacagctgccacacacatgccctcctggggttctttatcctccacagtgactccatgaggaaggtactatttccaaccacattttacagatgagaaaactgaagcacagaggaattaagtaacctgttgaatgcacacagcgaatgagtggcacagccagagattcaagtcccgactctgggctctcagccatcccactctccctcctgccatctctccgccaagaactggggaaaccaagcaggctgctctgagggctgaggcagagggtggggctgtgtcctggctgagggcaccacagcgggcccgtggggaggcagggggagaggccgtggggcccaacgctcaggagggtgaggagcagccagggctctgtgataacctctggagcccttcactacgcagataagccctgctcgccggggctcaggcagccgctgggcagcagagctgtggaggtcggtaggaaggaagctggaggctgagacagtggagcccaaccccagaggctgctcggttggctggtgtggtcactcacaggactgtgggcattgccacctaccgaggttgccacctggaagcagctctgccttggggacagcagtgctgcacagcatttgggctacgaaggctggaatggctgagtgtgcgagatagggagaggaagccagatgtcaccaggaagcttttctatgtcagcattcctagaaaaatatctcaagatgacttggaaaaaaaaaaggaacctggagatccacagctccaggaatttgtggttacttggtttgtcctaaatattcacttttgtacctaatcttgaatttctcatttgaaaattattttccctgaagagggccacccaagtcacacaagcttcaggccccacaaaacttggatctgccctgcccagagctgtgcccctgtcctgggtcctgccccaacgtgctctcagcctgtctaactttttaagtatttatatatatttttatatatgcataactgttaaggaaatggccacacactgttctgcaaagtgactactccattttactttcccgccagctgtgtatgacagttctgggacccccacatacacaccaacactagctatgctcagactttttacttttagccatccgaataggtgtgcaggtgtttgaatttgcatttcccaaatgactgatgatattggacatcttttatgtatttagttgctatctgtgtgtcgtttttggtgaaatatctgttcaaatcttttgcctatttttaaaatagattatttattttccattattggtgttgagagttcttgacatattctggatataaggcctttaccagatatttgctttgcaaatatttctcccagtccatgtctctctcttttttcattctattaacagtgtatttccaagagcagaagtttttaattttgcaaagtccaattaatcatttttttcgtttattgagtgtgcttcctgcattgtatctaagaaatctttacttcatctaaggccataaaagttttcttctaggttttctttcaaaagtttcacagttttaggatttacatgtaggtctatgagttactttttgtatatgggagaaggtgtaattgaagttcattcttttgcatatgcacattccagccccacttggtgaaaagtctatcatttctctacagacaccagtgaacctccatgtgcaatcgtgctatctgcaaatagagacagtttacttcttcctttccagctgggaatcgtttctttctttcttcttctaatgacactgaccagagcctcaaataccatgttgaatagaagtggtgagagcagacattcttgctttttcctgtatcttatgacaaaagcattcggcttttcaccattaagtctatctgctataggctgtttgaagatgtccttaatcaggttgagaaagttcttttctatttctaatttgctgagaggttttttttattgatacataatatttgtacatatttatggagtacatgtgatgttttgttacatgcatagagtgtgtaataatcaactctaggaatttggggtgtccatcacttcaagtgtttattattcctatgtgttgggaacatttcaagtcctctcttctagttattttgaaatatgcaatacattgttgttaactattgttactctaccctgctatggaacattagaatttattctaactctatgtgtgtacccattaaccaacctctcttcatccccctctctgcttgactcttctcagcctctggtaaccatcattctaatctctacctccatgagacaaacttcttttcagctcctacatataagtgagaacatgcaatatttgtttttctatgcctagcttatttcacttaatatgctggttccattcattgctgcaaatgacacgatttcattccttttctatggccgaatagtataacattttgtatatataccacagtttctttatccattcatccactgatggacacgtaggttgattccatatctttgctattgtgaatagtgctgcaataaacattggggtacattaacgtatttatgccaagtgttccattattggaatgctaagcttgtgggagttatgcatatcctactgctcaaggtcactgccaaggtctgatttttcccccaaaaatttgcaacctccggcataaatgggttaattcctttgatatactgatttcctttcctttggataaataccagcagtggaattgctggatcacatggtggttttacttttaggttttttgagaaatctccatactgttttccataatgactgtgttaatttacattcccaccaacaatgtataagagttttcttttttcagtatcttctccagtgtctattttttttgtgttttttataataggcattcaaactagggtaagatgatatctcattgtggttttgacttgcatttctctgcatttttttcatatacctcttcaccatttgtatgtcttcttttgtggaatgtctataggatcctttgcccactttttaatgggttgttttgccagctgagttccttgtatattctggatattcgtttcttgtcagatgaacagtttgcaaatatttttctcctattcaacgggttgtctcttcactctgccgattgtttcctttgctgtgcagaagattttttagtttaatatagtcccacttagctatttttgtttttgttgcctgtgctttagaagccttagccataaagtctttgactagaccaacatcctggagtctttccctctatgttttcttccagtagtttcatactttcatgttttatgtgtaagtctttaatacatttgtagttgatttctgtacagagaaatgtgagagatggggtctagtctcagtcttctgcatatggatatccagttttccagcatcacttattgaggagggtgtcctttccccagtgtatgttcttggcacctgtgtggaaaattggttggctgctgagccacgtttttattgggaatggatgttagattttgtcaaatgtcttttctgcatctattgtaatgacagtatatctttttagtgtgttaattgatgaattacgctaatacattttcaaatgctaaaccaatcttgcattcctgggagaaatcccgcttggtaatgatgtactatcccttttatatattgttgttttgatttgctaaaattttgttaaaaatattttatgtatcttcatgagggatattggcctgcagtttcctttacttacagtgtcttggtctggttttggtggcctcacagaataagctattaaatattcccttgttttcaaacctagaagtttgtagataattgctattattccttccttaaatatttgatataattcaccaatgcagccatctaggcctggagtttactttgtggaaatgtttgtaataacaaatacaatttctttaatatatacatctatttcttcttgagtaaactttactagtttgtgtctttcaaagaatttgtcagtttcatctaagttattgaatgaattggcataaagttgtccataatgttcctttattatccttttactatctgaagaagctgtactgatattacctctctcaccctgatattggtaatttctgtctttttccttttctccttcaatcagccttgctggaggattaccaattttattgatctcaacaaatcagccttttgcttcattgacttttttgtttttgtggttagcaaacttgtttttaaaggactagatggcaaacattttaggtttttaggccatatagtctctgtcacaactactttactctgccactatagtgcaaatgcagccaaagacaatatgttaacgaagggtcatgactgtatctgtgtaaacttcatttacaaaaacaaacagccagcctgcaggttgtaggttgccgacttgggtcatagttcattgatttccactctgatctttatttttttttcttctgcttaccttgggtttaatttggtctttttctagtttcttccagagttcagtgctataattgtccctgaactactactttagaggcagctcccagatttcaatacgttgtgttttcattttaattcagttcaaaataccttctagtttccctttggatttcttctttaatttatgggttatttagaagtgcgttagtttccgaatttggggggattgtaccagaatatggtatatcttgctcagtgaacttgctaagtgcactgagaaaaattattctgctgtggttgggtggagtgtcctataaatgtcaatttggtctagttgaaagttttgttcaaatcttcaatatccatactgatttttctgtctacttcttctatcaattattgagagaaggctattcaaatctccaattataattttagatttgtctattttctccttgtatttctatcagtttttgcttcaggtagtttgaagctgttatggagcataaatatttaggactgttatgtcctcttgaagaactgacctctttatcattatgaaatgaccttatttatccctagtcatattttttactctggtctgaaatccttgatataaatatagccatccagttttcttttgattagtgtcagtatgatgttatctttttccatccttttaacttatttgtgtctttacattttaagtgcattttttatcaggcatatagttgggtcctgctttttatccaatctgataagctttatttataatgtgattattgggatgcttagatttaagtctggcttctgttttctatctgtcctttttctcttttcttgtcttgttttggatggagtttttgttttttgtttttaatgacttcattctatctgctttgttggcttattagtaaaaatctcactctcttcatgctgtaggaattgctttagggtttatggtatacatctttaacttatcacagtctacattaagtgatattataccccttcatgtatgatataaagatcttacaagattatacttccatgtcttctttcctgaccttttttgcaatgtttatcttaccttttactggtatactttgttatacatctcataatatattgttgctatttttattttattattttattattattattattattttgagacagggtcttgctctgtcacccaggctggagtggagtggtgcaatctcggctcaccgcaacctcctctgcctcctgggttcaagcaattctcccgtctcagcctcttgagtagctgggattacaggcacgcacaccacgccaggttaatttttgtatttttagtagagacggggtttcaccacgttggccaggctgttctcgaactcctgacctcagatgatccacccgttttgacctcccatgttatttttactttaaatcttaacatcttttgaaaatatttaaattataagagaaaagcatatatttacccatgtagttaccacagtgcttttcattctgttgtgtagattcagattcccatatggtattattttactgctgcctggaggtcttcctctaacatttcttggagtatgcagctattggtgatgaattctttcagctattgagtgtgggaatcattaattcatcttcatttttgaaagatattctcactggataaagtcttcaaggttggaaatgtttttctttcacaactgttaagatgttgctctacttgcattgtttctcatgagaattttgccatcatcctcattttttgatgttttgtgtcttttttactgtttcactagttatgggtaatttgattatgacgtgcctcagtgcaattttattcaggtttcctatacttggaactcactgaacttcttagatttgtgagcttatagttttcataacatttggaatattttggcgattggtacttcaaatacgtgtttccatcccctgtccctgcttgagattccagttacatgtatattacacaacttaaggttatcctgcagctcgctgatgctctgtttttgttaaattttttttctctgtgtgttttatctttgtacagtgtggtagcagaataacagccccccaaagacatccacatgcctgtccctggaacctgtgattaggttaggttacacagtgaagaattaaggttgcagatggaattaaagttgctaatcagctggctgctttaaactaggaagattatcctagattatccaagtgggctcaaggtaatcataagggtatttaaaagtggaggggaagacagaagaggagtgtaagagagagatgtgtctacagcagaagggataaaatgtgagaagaacctgatctgtcatttttagtcttgaaggtggaggaagggagccaggagctgatgaatgcaggcaacctctagaaactggaaagctcaagaaaaatggactcgccctcagaccctccataacggaattcaggcctactgacaccttgatttaagcccagtgaaacctgtgtcaggcttctgacctacagaaccataaggtaaatttgcattgtttaagccactaagtttgtggtaacatgtcacaggccaggcaccaggcacagtggctcacgcctgtaatcccagcactttgggaggctgaggtgggaggattgcttgagccccagttcaagaccagcctgggcaacatggcaagaccccaactctatgaaaaataattttaaaaaattagccaggcacggcatgaccaagcctgtggttccagctactaaggagtctgagcccaggagttccaatctgcaatgagctgtaatcatgcactgcactccagtctatgccacagagcaagatcctgtctcaataaataaataaatagtaaacaatgtgtcacaacagcaatagaaaactaatacagctagctgctattgctatgtcttcacaaatcttttcatgttagtgtgtctaatctgccattaaccccacccagcattagttttcatctcatacgtaataggtttgatctctagaagtttaatttaggtctttttaaaaaaataactttcatgtgtctactttttgatcatatagaatacagttagaaaaactgttttaatgtctttgctaattctaaaatctgtgtcatttctgggtttgtctcaattgattgctttttatttttctcctcattatgggctacattttcctgcttctttgcattcctgttatttctaattagttgccagacactgtgatttttaaatggttgggtgatgaatgtttctgtatttccataaatattcttcagcctttttctggtatgaacgtagattcttggaaagagtttgatccttacagatgttgcctctaagatttgttaggtggaaccagagtactcagtacagagctaattatttcccactactgagggaaaacccttctgtatattctgtcctacgccctacaagctgttaggttttacggtcttgcaggcaggaacaggtgccatgctttgcctggcattagcgtgggtgctgttgcctctgatcctttctggtagttctttgcccaacctggggtagttttcctcatgtgcacatggtgacgagtgcatggctcaattctcaaggcatttttctctctgtgcagctctttcctcctcagcagctaccctgcagactctagatgttttggtctgtctggacttttagctctgtctcttcaactcacagagtccaacgggctccacctgggtctccccttcctgcatacagcctgcaaactttctccaggcagtcagctggggcacatgtagggaatcaccttgtttcccatctcttgggggtcatagtccttccctaacgtattttgaaagcattgtttcaaatattttgtgcttttcttttttctttcttttcttttttttggctgtttcaggtgggagggtaaataggtccctgttactttatcttgtccagaagtgaaaaccctattaccatgcctaagggcctactctatatgaaacaccctgcaaggtgcttaataggcccagtcccaggcagtcttcatagacaccctaggaaggagcattgatgaccccatttgacaggtggaaaaaccgaggctcagagaagttaagaactttgctcatgaacaggcaagtggaggtgttggaattcaaacacaggtttgtttgcccataaactcattctgttttctcaatataaaatcttccttatggcaataaaggggagtgcaaggaagatgaaatggaggattacaagattacaacaaacttggggactttctacagtgttccatggtttatgctgaccttcttctctgtaacttaggaaacattagtattagctttacttaaatgaataagaattacactggcaaatatttcaggaataaattcattatgaaagatgagtgtctattatcacagtttctggtttttcctcttttttaattgtctgtgtggccactgtgtttccaccccatcccattacacatgacagacttctgaggctgcctctttttttttttttttttttttgagacggagtctcacactgtagcccaggctggagtgcagtggtgcaatcttggctcactgcaagctccgcctcctaggttcacgccattctcctacctcagcctcccgagtagctgggactacaggcacctgccatcacgctcggctaattttttgtatttttagtagagatggggtttcaccgtgttagccaggatggtctggatctcctgacctcgtgatccacccgcctaggcctcccaaagtgctgggattacaggtgtaagccaccacgcccggcccagaggctctcttaaacagtgcttagggtccaacgtctatgggtcaaacctcagctccctcaatgtggagcacagtgacttaatttccccaactgtcagactcatgcacctgtagggggatgaaaccaaagggacccacctcatcaggagaatgaaatgggacagccccttagcttagtccctggcagctggcaagcactgtctaagtgttcccttttattatcatatttaagtacaggatagagggggatttctcagcctcagcactactgacatgttgggtgagatcatttttcatggggtgtggaggcctgtcctgtgcatagcaggatgggcagcagcatccctgacctctgcccactccctccctcccaggctatgacagccaacagtgtctccatacattgtcaaatgtcccttggagcccaaatgccccagttaagaaacattgatacggaacagccagatctctattgcctatgagtctaaatgacttacaattctatcatcctgtgacttcccgtaggcacaatgtggcatgtccaagaattctaagtgccgcttctatcaaactagctcctcctgtgttcccacttcggtggccacagctaggtgcccaaggcaggatgttgggagccccctggactcttcctctccctcacctttacactgaccccagtctccctggtgggcccatccgttctcaggcgttaaatgctgtcctcgtgctgagacatccagattcactgctcccctgacctccagacctgcgggaagttcacctcccatctgcctacaccctctgctctcaggtgagggcaactccatcttctggttactcaagttgaaaccggacacatccttgctccactctctctcacctctcctatccattcctctcagcaaattctagtagcttctccttcagaacatagctgcaatctggtcacttctcactgctcacctggtctgggccaccaccactcctcatctagagtgctgtacagtctccaggctccttcctttatcccgacaatctattctcagttgagcagccacagagacctggtagaggcctgaaccagctccccaacccctgctcaacatcccccagcaggcccctcttggcaaaggcctcgcagtgagcctgaaggcccctcacccctactcctgcgacgtcatctctggctcccctcccctttgcttttgccagttctcaagcacacccggcatgctcctgcttcacggtttttggacctgctgttcccttgctcctgctgtggcccagaaagctgtccttgcagcactggcccccttcaggtctttcttcagatattaccttcttggggaatctttcctgaccaccctatttaaggctcaccatgcatcacccaccacaccccatgttccttcttggcctgaattttttcatagcactgattgcaatcaatacactctgtatgtattttatgtgtttacatgacatgcttattcataatgtttctggttggcccaccccgactctgtctattttataggcaactccagcacagccagcagagcctggcatggagaggacacgcactgagcctgagatgaataggaggttagtgagggcggcagcggcagaacaaaggagactggcacacgtgaaaccctcgcgtaaggcgggcatgacactcacagactgatgagcgtgagtagtgtgaacacttgtgggatcttgagggaagcagtatcactattcccattttaaagagaggtaactgagcccagaaatgtttagaaacagccccagctctaactatgagctgtgtgtgtatgtaccagggaactatgaccccgggaagtctggctcctatccgaaccccacttttctcactgcttctgcctgtggcttgttcaagggcaccagccccaggtgaccagccctttttgattccagccaggctttctcccctctgagctcctgaacttaaggatttccttttgagacctggggagagggggaggctcgaaaatgcaggggtcgcaggacaagaactggctttcaacttttccatataaacattttcataagaaaaagaaaaaagggtaactgatatgtgtgaaagcattttgtaagctgctgggacttattccattatgttcaggtgaaaaagttgtcaattgatcaaattatatatctgacttaacccttctttaccaaggtttattgaaaaatattttttaaaacttttttttaaaaaaatattttttaaaagtggcagcagcaatgtatgatttgtcacagggcccactgtcactctcctggctgcctagagcacagaagccctcggagggccctagcagctgggtgtcaggggtgaaggccaagtgtctagatgcagccgtctagagcagtgtgatccaacagagatataatgtgagctacatgtgaaacttcaaatgttttagcagctacactcaaaaagtaaaaaggaacagctgtatttatgtttaaagtatatacaaaataaattactttctttttttttcaagatggagtttcactctttttgccccaactggagtgtagtggcacaatcctggctcactacaacctccgcttcccaggttcaagtgattctcctgcctcagcctcccgagtagctgggattatgggtacctaccaccacacccagctaaattgtgtatttttagtagagatggggtttcatcatgttgaccaggctggtctcaaactcctcacctcaggtgatccgcccacctcaactcccaaagtgctgggattacaggccactgcactcagccaaaaataaattactttcaatggcaaaaacagcaattacttttgcaccaacctaatattttgtttattccaatatatctacaatagtagcattaatttcaacatgtcaattaaaattattcagatattatacatatatttgtacaaagtcttaaaaatctagtgtatatttagcactaacaacacatctcaatttggactagccacgtttcatgtgcttagcagccacatgtggctggtggctacagtgaggaacagtgtggactggggctggcggtgtatgttgcctttgatgggccattattttgccaaccacactctcaggcatcctgagacctgcctgtgtgtgtggtgttagccctgggcaatgagccagctggaggttcctgcacaggatccctagcggcggcctcaccctgccagatgtaccaggctgaacctccctgctgtcctcccagtcttcattcatgtctttcatttctctttacctggttgcggccaccaaacaccacttccctttcaagggttaatcgccctccccagtctcccagcctggtcctcacagcctgccagtgactccagctatccacttacccctgggcatacgcctgctcctcttcagacacctgatgggccagaagggcatggtgtggagcagcgggggctgcagtgagaggagcagtggccagacacacctgttggggtgcagaaaaccaccaggtgcacgaggcactcctccactgcagggctgcggccactcggctgcctgtgtgctctgcctgtgggcatcaggctgaggccttttgtctctcctggggaacttctgcatttatcagtgcccgaaggctgggactgtctggggcggggcaagaaggacttgctgggatccccgccagtgggaggtcggcgtggttgttctgcatccgcatctgtgcctgccaccctgtgcacttgtcctgctgtgttcttgactccctgaggtggggggagtgtccatcctatttatctggcatgtgggaaccccagctcagtgccactagctttatgcctcagggttctctccaggtggacccacccaccaggtattggagattaatgaatgcatgggagaagcctgatgtaagtgcttatgccacatggtcttgagatagttacttaatctttctgtttccattttctcatcagcaaaacaaggccaataactaaacccacctcccaggactgtggtgaagatggaatgagaccaagaagccagaggctgggcacggcacctgcacgtggtacttggtaagcacctccgtatcctctaaggtagacacatggtctgtgtcacagacagagaagctgacgctccgtgagctttcagtggcccagggtcaccacgctgggaaatggcacagccaggatttgaactcagctgttgtggattctgtgcgccagtcagctgctgcctttatggtgtctcccttgcctctgggacaaagggagcaggaagcagctccttcacctagcctggtctcctctcctccagcagcagtcgcccctcccaggatgtggtttcaggagctcacacctcaggcagccctggagggcagagggaggcaatgagcaccaaactttgctcagtaagtacagagcaaggggctacgcctgtgccgatgccacctgttcatctgcccatctcccccatttctccatccatctgtccacttgttcatctgcccatctatccatctgctcatttgtctacccatctatctatccatccatctgtccgtccatccatccacccatctatccatccacccatctgtccacctctccagcaaagaaaagcagccccttaagggcaaagcacaactgctggaaacccttcagagggcctactgttcttggaataaaacccaactctgatgtgactgtgggcctccaggtccctcggaccacctctcctcccccggcccatgtcctgctgtcagccactctagcaccctctctccctcaagctcaccctcttcccaccagaaactttgcattctctcaggtgctccaaatgccctcccacctccttgcatggctgactccctctcatttaaagcctcagctcaaatgtacattacagaatccttccctgggtgagagccttcgtcaaggagctgcgccctcccacccaattagtcttacacgactttctctatagaacttatcctgattggaaagcagcttgtttgtctgcatacgtgtttactgcctgtctctgtgaaaggaatgtacgacttatgaaggaatgtatgactgttcttcctggtgtccccaggtactagtctagtgcctggaaaaggctcagggttcagtgaatggcagcagtcacagagggggatgtggagggctctgggaggtaacaggcaatctctcttaattaaaatatccagctttgattgagtgctcaccatatgctgggcatcatcctaaaagctttcgtgttttatctcgatgtcctcacaaccacctgatatggtgttacaatgatgataccccatttacagatgagaacacagaggctacagaaggttgaataattagtcgaaggtcacatgactaataagatgtatcttcccaactgcccccggtcacccaagggaaattagttgccaactggtgcctaaagcactggccactcacagcccactcttaatagctgaggatctgaatgccccaggcagtctggctgcagagtgggtgctccaggctccatcccttggtgggcagcctctgcaatggcccccggtgaaccttcctcctggtagtcagactcttgtgtaattactcctcgtgaaggtgggcaggacctaataacttgcttttaatgaatagaatgtggcaaaaattgacaggatgtcacttctgagattaggtcacaaagagacagtggcttccctctcacattccctcgcttgttctctggcttgctggctgtgttgaggcaggctgccctgctgggagctgcccgaggcggaggcccacgtggtgagaaactgagagaagcctccagaaacagccagcaagggactgtggtggtctgtccagcagccctcaagggactgtcccttacaaatagccgtgtgattcagcttgaagtggatctcccatcagtcaagccttcagatgagcccacagttgcagccaattctgtgatgagcctgtgagagcccccaagctacaggatgcagccaagccacacccggattcccgacccacagagctgtgggataataaatgtttgtgttttaagccactaggcttggggggtaatctatgatgtagcaaaggtgatgtatgcaatccccattttgtcaaaacatagcctgaagcacaaccatcccccttatggtcggttgtcttcagaggcctggacagtggggctctggtggtatgaggatatacaatcctcacatctcttcctgtaccaataaagatggggacggtaataacattaaataacaacagcagcctactatgcgccagtcatgtgccacatacacgcaatcacatagactatggcattttatcctctccatagcttgtgagataggtgtcatgattctcattttacagataaagaaactgaggctcagagagatggactttgttgctcatagtcacataggtaagaactggaagagcaagaattcccagcccagagctgctgcctccagggctgcctgttctggccgctctcttcaccttagctgctgggacctgacctccttctctaggatcttacctaagatccttgtccccgggtgcctgctgaacaatcgcctggtgcctgccagaatatctgtaggaagacagccggtaacactaggtaaggaagtctgtactgccgtgtgccggttgctactttatggaatccccctcctagttcagtgcagtaatggaggggggctgcatcttgccctatggagttcacaaacctggctgtggaggtgctgtgtagtacacctctggagattggggggtaggaaccaaggtgccctaactgccactgggccgtgagctactcacactcggctttctcaggtcctagctcagagtgaaatgggtataccggattccttggggctctgtgcagggggcccagggcccactgctccatcccccagggcagcactgcactgggccctggaccctgactctcccaactgcccatggctggtcaggagaaactgcatgctgctgacctcctaggggtttgacacctcccacctgctcttaggtggtgatcatgggacctggacaatccactgcctgcacatacagggctagggtctcccatggaaaaattatcaaaacggcaagatgtgcttactcagctgcaaaagcaaagcccactcctgaaggagagcaggatcctgaccttgtctccccagggtaggccttgggccacagctctgtctccttggcatgggtgaagagtaggtggggttctccagggcagctgggctttctgcttcctgcctcctcctcagcagcgctcagccagggataggaggaggctgatgactcacttctatgtttccagaaagtgtttttattgccataaatgcagagagaaaaggagatgcagaaggcagaggggaaggagggaagaggatgttgaagagggagtgccggtggtcagcggacgctgtgtaaggggtcggctgtttgaggcctcgcagtgtgctgcagtacaagctgagcagtctggggaggaaggagcccctccaggaaaacagctctggaaagaagaggcagggcactaccggggacacaggaacaaagccaaggaaacctgtggtctcaccatccacctgccctgtcttccaggtcccccttggccacaatacctcagtcccaggtgcagctcctgccactcgcagcaactgcaaggcccaggggctcaataaacggacccctctcactctgctccatcccccagggcagcactgcagtgggccctgggccctgactctgtcgctgtcatggggtaggagaagggggccattccagggtcctcccagcaggcctgaagagataaagggcagaatatcaggaggggaggcgatagactgagagcagcagaaacttcaggtgtccatggttcctctagggctctgcctctgtctatcccttagagttgctgtgtgtgtactccagagaaagaggatgcagtgcctcgggccggtccccaacttgcataaggctccctgcgggtaacatctaccttggcctgtcatcacgagcccacatgctctgttttctgagaagaaagatgtgatcctgtggtgaaaggagaaagctggcccgagcaggacacggcccagatgagtctcccattacctactctcgcatccctgcagggaccacggcagccacactgcatagctgtaccagggcacctagaaacctggtgagtccctctcctccttggggtgtgctggcgaacaatgaaggcccctgaacaaaaataccaggcacctgttggtcctcagagcctccaggtgctccacatgatggcccttctggccccttgcccaagccaggagccagtgaagtgaagtggcccacatgtagaggaagccaccccaacacccccaccagtcccagcacaaggatttagagccctctgcatccccaagcagtggccccgctgcagcctccctctgcccggccccctgccctatcctttgtggagttctcatacccgctctgcacacaatagcacctcttgatgcgctagagccaaaagtacaattctagctggcgtaagaagggcagcagccacagagtccatactcaacatttcagaacccaaaatgcccaaacaagcaggcaatgacaaaagccaatccaataccagaagcaacatcatgaccaaagcaggggaatgggacaccaggatacacaaaggtgatggaatgacaggcagccattgaaagaggtgcatacctatcactcattaaagaagatctggaaagaaatgaaaagcagttctattttacaggctgccctaagactagagatgcagccaccgagacccaaggggagcttcttggagggacatctgagaaaggctccctcctgtctaagaaggactccaccaagagacccctctccatggaaggggcgtgtcctgcctgttggtcgcttggtggtcatcttgcagccactccggccagcgagcagagccaatagtccaaagcgggtgaaggggcagggggaggccatgtcctcattgacagtgctggggccccgaatcaccagcccggggggctgcctccctctgggtttcttggtctgtaagaataacatagctcctttgattttggaaggttacatgggctttcctgtttcctgcagctggaagcaggatggtacagatggcgtgagagccacaggccgcccacatagctgcaccacctcctccccaagctgccaggcatgggcaggcctcgctggcttgctggtgcacactggcggcctgcagctcaccagtctaaggggaaatctgaaaagacacttgacaaaactgaacatccattttgataaatattctttgttaaatgagaacaggtggcttcttcacctggatatactcaaagccaacactgcattcagtggagagacaatggcaccattcccatcaaagccaggaacgatacaggcacgtctaatgaagcccctggtatagagcatttccctggaagggttcaccaaccagacaagagaaagaatggaaaactatgaaagctggagaggagggtgagctgttattactcctgctgttaaattatttttcagggtacttgtttatatgtgtggaagttctaagtcaatgaactgaaaacccatcataatcaataaaagaatccagtaaatcaactgggtgcgaaattaatatataaaaagaacaatctatttgtaaattaggagaaacagaaatgcattctatgtatataagtaggaaaatagagatgccagcagcataatagagatgccaattctctctaatttggtctattaatttaacacaatatgaatagcatttctttttaaaccagataagttgattcttaaggttcataagcaaaaatagcaagtgcacttttgaaagaaaacatagtgaagtccgaccagcccaaccaattattaaaagagagtatagaggctaggcatggtggctcacacctgtaatcctaatactttgggaggccaaagttggaagactgtttgaggctaggagttccagaccagtctaggcaacagagcaagaccccacctctgtagacaataataattaaaaaattagccacgtgtggtggcgcacacctgtaatcccagctatgcaggaggctgaggtaggagggtaacttgacctcagcagagcaagaagctgaaataagctgtgatctgaactccaaactgggtgacaaagcaagactctatctcaaaacaaaacaaaacaaaaacaacaacaaaaacctgagtagagctactcagtaattaaaacagcactgggtggcatgaccagagaaagactcacacacatatgggagtttggaatgtttaaggagctctttcaaaggggtgaggacaggtgggattctctaataaatgggatagggacaatgggagagccacatgaggaaaaatcaagctgaatccttatgtcacaccttacaaccaaataaaaatacacaatagatcaaagattaaggccaggcgccgtagttcacacctgtaatcccagcactttgcgaggctgaggtgggcggatcacctgaggccaggagttcgagaccagcctggctaacatggtgaaaaaaccccgtctctactaaaaatacaaaaattagctgggcgtggtggcgggcacctgtagtcctagctactcgggaggctgaggcaggagaattccttgaactcaggaggtggaggttgcagtgagccaagacgacgccactgcactccatcctgggtgacacagtgagactccgcctcaaaaaaaaaaaaaaaaagatttaaagttgaaaaatgaaactataaaagtgccaggctcaaccatgggagaaattttgtataaaattttggagaaggcctaagtatgactcaaaaacaagagaccacaaaagaaaatgtaactacatgaaagttaaaaatagttgcaaggcaaagaaaagaaagtgaaaagacaaatggcaaaaggagagggcccagctacatatccataaaatgggatgctttgcaggtattaaaaaatgagggtgtactttatgcccagatttgtttgaatatgtacaaagtatctctggacagagaaagagaacagtggctttttctggggatgaaggtgagtggctggaaggcagggaaacagggagactggcttgtgccttctgatagttgtactatttgttacctattttaaaaaacaaatgaaaatgaggtttaatataaagtgacaggtgaaatgagccttctcacaccacgtgttccaggtgtgtgggtaaggccagtgcagggcccctgaggcctccccatgggaggtgctcttggctggtttaccagcatctcaagggaggggttgcagctgaaggcatacacctgatggggatggtgaggaaagtgggcagaccttcgagctgttgctagaagtagattttggttttgacaatctctttggaagaataatttgagatatatcaacattttaaatgacccagcaatctattcctagaaatttactcttcagataaatttgtacacgtgcataaaaagttagtaaacataactgggaacaacttaacctttcatcaaattaaataatgtattgattaaattatgtacatccaaaaaaaaaaaaagaaggtggtgaaactgtgtgaagtgatacgggatgctccgttactatgtggaaaaagtaaatggatgatatatactcagaggtgcatagatctgcatgcctatttctggaaggaggagctggatactgggccccaggctagctcccagaagagaagggagggtctcaggagcaggggaggagcagcttcctctcaggagaggctctgaagtgctggcattggattctcacaggcacagatgactgtcttgattgaagattgtgtttattttcattgctgagagagtcaggaacttgtgtttggtgctggagaagttaagccagccctgtgttttgagtacttttaatttaggaaaatgccccaaatgtcctccaaatggtttcagctctgttcccctttcactagcttataatcatagcagagtttcacttcttaaaaccagcctctccctaagaatcttcctttgtgattctggggatgctggggcttttaggggatcagtgtgtgatcttgccctgggcagtacctcgtgggggaaggaggactctgatttttctcccagggacaattgcagaagtgaagagtgtgggaacagctggggaatgcccaggcactgccaaggggtggtctctgcagtgcagtcagaactttcccttctccattgagaatcttacatcatggccttaccctgttgtcttcaggacacgtcccagtttgctgcttcccactgggctcctgcttgatgagcggagagcacctttccagccccagccagctctccccatctcaccggacactccaggtgccctgccctcttgcttattgccaggaagcaccacattcttcatgcctccaggtgtttgcacatgctggtgcctttcccacctggccacctggcaaactcctactcattcatcaagacccagctcaaatatccctacttctccctcaccttccccaaccgttgcccttcatccactcccaaatttccatatcccattcttcctcccataaatatttattgatggtctaccatgtgccagacactgtgccacatactggggacacagcagtgacaaaagcaagagtctctgcctctcagagagtggcccggtagcggagacaggcattaaccaacatcatcaacaaactcaaagcagtcaatgctaggaaggatcccgggggcctactggggtcagggataaaggcataaattcagaacagcatcctctcagccacctccacccacggcttgggctcgcctggctctgaggctgattggacgaggccccctcgtctcctgaccttggagaagccaggacttggccaggcctccgcagtaagaatgcatggctgagactggaaaacaccaaggaacgtggtgccatcaccaatgtaaaaatatttggagggagaagaaaataagttaaaacagcagcatgttaaatggaatatgttaactgtcagctgaagaccatgttccgaaatgttcaagagaggggttgtggggacgaatggtggcctggtggctgatgtaactgatgctgagtgacctggagggaataacggatggctcaactcattattctaaggaacaaaaaaggaactaacatttatgaggcacctactcagtgccagcttccagtgtcaacctgtccagtgactctgtggaggggagggctatttatttctacattggtataaacgatgtcagtctcagagattaatgaggccccacacctgctgctgcggctactgctgctaccgtcactggcaccaccaccctgctaacaccacgtacatgctttgtgaagctcctctcccagcaactctgggaagtacaggctattatcccgctgtccttccctaccatcccatggtgccgggagaagcccaggccactgggtgaacctcccaagtccaggaggctggtaagtgatggaactgcaatgtgcatcgatgtcccctcctcagcccaagtcctgctggcacctacctggagtgccccttccgggcctcctggggtatgagtggtgcctgcacctcccctaactcctgctggagtgctctgctatgagtgaacacatcaacatttgctaaatgagtaactccgagcaatgtggcctaataggaagcagatatgaaccccggctggcctgtgcctttctctactttgggttgctattgagaacgttttcccccaactaacagtgtgtcttaacctgggttccctaaaatcaaagcctgaggaaaaggttattgttcaggaagctatcccagggagaagtgcgggatggggaaggagggatgggaaggagggagagccccacagggaagctggataagctgcctgctgccctgggggcctggggactccatttggcctcatgaaatgtgtgtcaggactgccagtcctgggatgaaaaggggaggaaggatcccctggctccagtcatccaatggccaagggtgatccctggaaccttagctccccactctccagagggctggacccatgcaggaaacctgaagggcagggaggctgattcttccagtgagaccacaggtacttcccaagactctggtgtgtgcaggatgctgtgcttgacatatggggtggcctggatggggtgtgtgggtgaacaagggagacaaggcccccgctctcctggagaaccagccaaaggacagggagccaaccaaggtggcagggagagctcagatggatgggataacagaaatggggtgggtcaggaaaagccactctggggaggggatcctctggctgagaactcaggaacagcaggggctggctttcttgcacagatctggtctgggcacaaaaggatgagcaggggaggcggttggcagatggacaggagaactgcaaaggccccgaggtgggaaaactcctgagctcttctgtggggctccgtgggctgaggagggcaggagtgggtcaggagcttagataggaagttctggcaggtgtccaggggagggaagcagaggctggggccacatgggctgggatgcaggtggtgacaggcacccaggctcagtgcctatctggatctgagactcagcagaacttgctcataagttgggggtgagctgagagagggggtgggaagagtcccggtagtgatgaattgagaggaaatttgagagcatggggttcaagcacctgggtgtgagtggagcctaggcaggcagaggggcccaagcaagcaatggggagagggggtgccccaagtcccaccacaccctgctttctctgtctccagaaactacattttattattactattattttttaagacaaagtctcgctctattgcccaggctggcatgcagtggcacaatctcggctcactccaacctccgccttctggattcaagcgattctcctgcctcagcttcctgagtagctgggattacaggtggctgtcaccacgcccagctaatttttgtattttttaatagagatgaggtttcaccatattggccaggctggtctcgaactcctgatttaggtgatctgcccgccttgggaaactgtacactttagactaaatataataaataaataaaaatcagtctgtaattgtaagcatcaaacaaaatatgctggtggcatcgccccactcccatcccactcccctaatccatccccaccatgagaccacgtccagcagctccaaaaatacagatgcaggagtcccgtgcgcctgactctgctctcctggctgtcctgccaggctgtctgctctcctgccaccgagccccatccccaattctgcatcacaaaacctcccagagccaggctggaggtggctccagaactcctccttgtggttggggcaggacctggctggccattcccagttccttcctggaaacctaggatgggtggatggggatcccctgggaggatttttgcctccctagaggtgtgttcagacggcttctcctggctgggatggagagaggggtaggccaggagggctgcctggtggaggcatgctggagatgtagccaaggcctgtaaggagcctgtaagggctggttggagaagctgcagcccaagggaaagtggcttgacaaatggcagaggctgccagggcctgtggctctccacacccgtgttctaccggcccaatactccgtatcccagttctgccccctctctggctagtcacgcagacatttgttgaaccacaaaatctataggcatgtgagaaacttccctaatttgatttggccaccacgtatctctcaccgacgctccttccctcttcacgaggagttcctgtaaggtcaggcagcagtgggccctcctcggcagctgggtgggacctcagggcctcagcaaatgtccttcccactctttttcactcaagttctttaggttcttataaaaacaacatatagtcaggcaccgcttagtgacagggatacgttctgagaaatatgtcattaagcaattttgccattgtgcaaaccccacagagtgtgctcacacaaacctagacagtacaggtactgcacacccaagctctatggtacagcccattgctcctacagtacaaacctgcacagcatgagactgtgtggaatactgcaggcaataataacacggtgggaagtattcatgtatctaaacatagagaaaaggtaccatgaaaatacaatactataataggatcactgtcacatatgcaatctattgacttaaacgtcatgatgtggcacatgactgtactattttcataagctgcctccttcctggaggccaggtataagcatccagacacgtaagaagtacccttgctagtgctaggatagaagtttcacaggttcactgtcatccagcaccattccctagcacaacaccaggaggcagccattcacatggtagtctaagtgcatgcgcccccaccaaggcagccactctcactgtagtctaaatcaatggtgccctctggaggcaacatggtagcttatgtgaatggtgcccctagagttatgtgacacgagggcctagatgttctcgcattcaagcctgtagacaaccttcaggaaggtcttatttttccattttctgcagaaggaaactgctcaagcaagaaggccagagctaggattttatgctttgtctgctagactcttagttcagcgctattccccttggcaaagctcacagggctggggagcaaaacctgaactcctccagcctctcagggcctcccacgccccccaccagtaccccagcaagatagggttcagcactaattttggaaaacacgctaaaaaatgaccttgttcccaagcaccatcatcatcttagccatccacatgtgaacttgcagagccagaaaagctgccagacccagggtgactcctgtcccttccatacacagagcatcacagtaacacctggtttatctagaaatcacccatctgtcaacctcatccatctagagtccaaggacacgcaaaacaatgattgggaaaggccaaacaggtgaaggtcccctatgagccaaacgactgaccttcgagggccttacttggggcttgctgactcttactttgcatacatttctagcaagtgcagttcactgctttatgatatgcgtaaattagaacaggcagttaaaaaaggattgggagagctgacagaggcagccatgctgacatcaggaggtgatggctgacagcaagagaagaaacaggaaatgccaggactcagaaaggttagccttttggggaaagggtgagcaacatcaacataaaagtcaaccgtgcaggcacacagagtgaaaagtgaaaagtcagtctccctcctgccccacacctctgtgtgctgggtcctctcccacaaagtggcacctgtgagcagtttcatgtgtcctcatgggacagtctccacccatgtatccatgtgctgaggacaccaggacaacaagcagtcaatcccgaatttgctcacaacctcaagtgggggcggccacaggctaaagaaatcacaaaacctcccatttactttgtaattcgcttaaggataggaagccaccagtaacagcccccactcagccagacacagtaattacaccgtgagcaactgaggctcggaaatactggggggtgggggtggggtgggggtgggggtggggggggatctgaacatagaaatgccaagtcccttgcctgaagccctgtagctgctgagtcatgtggacctgcttgtcttggaggcacctgcttctcgggccatccctgccttccactgggatggtcagactccaagtgtcagggctcaaaggctggggtggccactctccttactgaggcgggttttgttcattacatggtaatgctttgagaatcccaaaaccacctgtgggacttcagcctctggcccagctttcaccccaggcatatttggactcccaggcagaacttccccatcaaaggtcacttttcctgctgcagttgggtataacagcctcaccactgctcaggtagcggccatgtgtgcctcatgaccagctgttactggggacatgttggggacctgctgacgacaagtggctatacttttagaaaactcaaaactccacttcagtgcggctggcatggctgcccagcaagggctgctgtgtcctggctgcctaagcctttcccacccgggagggggtcccatcagccactcccagatccactgtgaggcccactgcaggcccttgtcttcaggcatgggccaggaccagcaaagtcacctccttttggagccatgtctggctgcctatgcaactcatgggtagggatccatgggaaaagacaaaaaaatgggaagtcatcaaaccctttgaacagatgggcccactgccaggagctctagccacacccgcatcctgcagggccagggaaggccaaagcaggctgcccagccaggcagctgtgtgaggaagggcctgagggtaaattgtatgggaggcactgcccagggcagggtacattcacatagcaaaggctctgacaggtccagaagctgggaaagccctgaaactgctccacttatcccaggtaccacaaaatgcattgctaactaacagtgacaccaatcaacatgccagaagcaagcgttcctaaggatgccttgtgggtaccactggggcaggggagagagatgcagttggtgaggataccactgttatctaatgggaaacagaggtctgcccacaggggaaggcagagaatgcccgcggctctgaaactgaatgctaaaggctttattctcctgggttccccctgttattctttgctcattgtcagtccacccaactgtagctgagcaggctctgggctgaagtctgacgtcagagctgggggtgtggggacagccatgagaagggcagtggtctcacctgcagagtgcagcatgccatcctgcactcagctggcgagcctggcgcaggatgtgctcctggccagcgtgggggaccagagtctctgctggaccccatggggcatcgctcaggagcacccaggacagggaggacaccaacatccccagtcagtggagcagaggggacacctccagcagaggccagaacaggatgccaggcacagcggagctttgttctgatgtctaccatcgatggctgtgcagacgctccatgaatgacactgttgtggtattttaagaagattctacaaatagcactaacttggaatgggcctcagagccaggctcatgaatgctcaagtcgaaggcgggccagcctgggagctccagccaggacaatggggcctcacagcagaggcagggcaggatgctgggtgaccctggcctcttccggggctccacagcctcatttcccccagactcgctgggccctccccgcacagccccatcctccccactatcagtgccttcccagaaggttattggaaaggagaggctctctgaataaagggagggggccgtgacatcctttcagtgcctgctactccggatttccagggacttccaggctctgaagacgcccgacgagtcatggaggagggggcacaggaaggaaggatgttctcagattttcatcagaaatcactttattaggagaaactcaaagacctgtagtcccacagtcaagaagtactaacagaacgctttccagacagtccattctggatacttggaagacagccgagagaagagaaaagaatatgaattttggagttagtcagcggtgggttcaaacatagcttcaccagccacatctaggtggcctggggcaagttttttacctcttggagccttgatattttcatctctttaaaaccaagggcattgcaccccctcgtggggacagctgagaacccagggcacagtaagccctcagcaaatgttggcctctcttcctccctgagtgagagaccactgatttagcgcatgagcatgctccccccataaaacagttctgtgctatggctgaaaaacacagcaggcatagaaggaactcctcttgaccaagtgaatctgcagacatcagggcaggcagcaggagcctaggtgggacaacagagagcactggggcctgcggcaaagtagagaggcttacatctaagccattttgtcctgtctggtacttggaaaatgtcttgagacaacagaggaaagatcatttaagaaagcggtgcctgaccccacccctggcacattctaaaccgggctgcagccatggagcggctatgccctccagctgtctcagaggtggcatggaagggctcggcttcctccctgcaccctcatccttgtcttgagtaactcttgtatgtactgtctccacctccaccatttcaaaggaaggaagggatagcactgctctgtgagtgctattagtggccttgcacagttttgtgtgcagaacttgtgctcaagtcacacagactaaactaaaatgaagtgaggcagccttgctcagagccaagagcacagggatccccagactcaggggctgtgggtggagtcctagctggcccgctgacatgctgtgtggccttagtcaagtcatttagtctctttggactaaaaaaaatcatctggaaaacgagaaggctgagccaggtgatctccatggacctctcctccaacccctccgaggctgtatgttacatctaaaagtaagcgtgatgccatcattagcaagagggggtcagggtttgaacagcagatgccctccttgactcttccctggtggctcttcactggaatagaccttgcttgtttttcaaactggactggagcaggatagagagtggctgtttgcaggcaggtgactccatgcacggcacggcagccaggacctcaccaagttagaaggtgctggtgtctacaaaggaccttggttgccctggccctcatcaggaagatggtgtgtggtactggtggacgcacatcctgcacaagtcctgctctcggtgccttcgtggcacacggcagccctgagatgccactcatccagccagcatgagactgcggcccagagagctcaggcacatgctcagtggcacagcaacagtcaggatttgagcccagggtggcctgaccccaaggccatccacgctgcccctgattctgcaccctcaactcccaaggagctgctgctccctccacacaagccatgtgccccagagggtgatgcaggcctctctccatccgactctccctattggtaaacggaggaagcagaaacaacctaatctcaaatacctctccttgctccaaggttcagggactctctgcttccagaagttgttgatgcagactgggtgctgctggaaatcctcaacaatggctccatagggcccaggactcatcataacaaagtggcccgtaagtccccagaagaggactggagcgtccatgctgggccaggcatgaatgcaccagatacttgataatgacatcattgactgttcaagtcataatgactgaacaaatcccagggtggggttgcctggtcctgaatggccctggcctgtaagggtcagcactgaaccagcttgtcaagatgagcactgagttaaaaatcctctctgccgcttctgtgggctcgcaagtggatctgactgtgacaggctgaagaacagcagtccctggccacctcccccaattagcccccagtctcaacaacagcctgagcagacttagtgggcagggaggaggctgctccagggacagagccctacctcaagaggaactccagtggtgagcaggctctctgcatgactgattctcagagaggaacctggataggctgaagccacaatggggaagtttgtatctgacctttaacttcttccaaactggattgactaggggatgtcccaggccttttgttgccagtttcattggcaaatggcatatgctgcttttcttattgtcctttggtgttctccattgctatttctcaaagtgcacaccggcttctcagttgtgtagtattaacatgaaacagatacaagagcgcaggctctggtgccagatagcctatgggaatcccagccgtgggtggccttaggcaggaaattgcacctcaacttcctcatctctaaaacaggacaattaataaagtccacttgagggctagcatgaggattaaatgaactctacatagaaagtgcttaaaacagggcttgacgcataatgtttatgtgttaaaaatgcttttatttcaacaaaacaatactggtctcatcactttttagcattttaacctaagcctcaagccaaataataatcatttccattttgggacattttctgtgtgctagcaatcttacacacagaggccaatttaactcttcccttaacacaacctagtgagacatcccaatttacagacaaaggtatccctctttggctcagagaagcatcccatccaaaggctgcacaaacagtagatggcagagccagaattcagaaccaggtcagcccagctccaagcttccagagcttccaacatttcacactgcttccttgagaccaagccctcgggtaccttaacccacctccatgtcaccacttagcatttagataaagattaggtaagggggacaaggccgcatctagagaagccttgagaacttgctcatataccttggtatgaattcatttctcaaagattctcattcctagagcactgtaaaaatttgatctgttttgcaacttcttaaaaaagccccttttacagaacattgctttttctctctttctcccccacccactcttttttaatcccccgtgcttccacagacactgagagagcattgtcatatttgatctgactcagagctcactctgcaggaaaagatctaattccagggcatttgtcaaaaacaatcagcagcaattccttaacattacagctgcctaaagctgtgataccaattggggcaaacaagagctggccaaaacttgcagatctggggaaggagatatccactgggggctttgaaaacccatgatatactcctagagatccagaaagccatatgcctgagcagcgctatgccattgtggaggaaagacgtgagagggcctctgtctctcatctctggctgattttgagtccctgcacaagcaggaagggaagactatggcagagtcacaaacttcctaagcaatggaagtgtgcgccaacacacaaacatacatgtgcaaacacactctcctcaaagggtagaagacttattgcttcaagacacttaagtatatttctgacaaatcattggctgaccaataaactaaccaagagacttgggtgactgcatacaacagggaacacagatttaattcaggaaattcactaaacaaaatagctacaacagcaacctgaggagggaaggtaaatctgatttgcagagttgccacattatattatttacaatgtctaggtttcaacaaaagattgtaagatacccaagaaaaataggtaagtatggcccatacacacacaaaatagcagtccatataaactgtccttgacctagatgttatacttactagataaagtcttcaaatcagctactgtaaatatgttcaaagaactaaaggaaactatgtctatataataaaacatagtgtgacaatgatgtcccaccaattacagaatgtcaataaagaaataaaaattataaaaagaaacaaatataaattctggaatttaaaagtacaataactgaaatacataaatcactatttgggctctaacagcagatttgagcttatagaagaaaaaaaatcagtaaacttgaagataggttaattgagaatagccagtctgaggtccagaaactaaaaaataatgaagaaaaatgaacagaacctcagaaattgatgggacaccataaagtgcaccaaaatacacaaaatgagagtcctagaaggagaggggagagaaaaaaggtagaaagaatatttaaaggaatgatggttagaacttcccaaatttgttgaaaaaaagagatttacacctagacacatcatagtcaagctgtccaaaggcaaagaatcttgaaagaaacaagagaaaatacaagagattctcattaaaattaacagttgacttctcatcagaaaccatggaaaccagaaggcaacagaacaacattttcaaaatactgaaagagaaaaaaatgacagtcaaccaagaattctatatccagcaaaaccatcattcataaatggagaagacattctcagagaactaaaaaccaagaatattcagtccttcgtcctagctgatcagacctacaagaaatcctaaagggactccttcaggaaaaataaaaggacattagatgttcattgaaatccacattaagaaatgaagagcacatatatagttaaaaataaaagacaaaataaatgtatttttatagctcttctatttaaaagataactgcacaaagcagtacttacaaaactccagtaattcataaagatatagttagtatggcaataatggcaccaacgagtcaggcagcagggagaacaaagttatattggagcaaagtttctgtaaaccactgaagtattaatctgaactatattgttttaaattaagaggctaattgtaatccccagaataaccactaataaaataactaaaagaataccatgaagaaacaataagagaattatattggtatgctggaaaatttctatctaatacaaaaagaaagcagtaatggagaaatagaacaaaaaagatataacatgtatagaaaacaaattccaaagtggctaacataaatctgtattatcagtaattacattaaatataaatggaataaatactccaacaaaaaggcaaagattggccaataaattttttaaataatcaaaccattactgcttatgagagacacattacattaaaaaacacaagtaggttgaaagtaaaatgacgagaaaagatataccataaagacaatacccaaaagagatctagagtgggtatacaaatatcagacaaaattgactttaaaacaaaaatgttactggatacaaagaggatgaacattttataatgataaaagggtagttgcaggaggaagataaaacaattataaacatatatgcccctataaacagaaccccataattcacatgacaaaaataaacagaacgcaggagattttaataattgttggagactttgatatcctactttcaaaaataaaactaggcagaacatcaacaaggaaacagaagacttgaataacataaggaatcaagcagacctaacatacaactgtagaatgctccacctaataacagcagcatgcacattcttctcaaatgcacacagaacatatttgaggatagaccatttactaaatcataaagtaagccttaaaaattttaaaggattaaccaaaacaaagtttgaaagtatattcactgactaccaaggaatgaaattagaaatcaataaaaaaggacatttgagaaattcacaaatatgtggaaactgaacaactcccttctaaatactcaagaagctgatcatagtggcatctgtgctagcatctttgggtatttaggggtgagttgggacgtgtagtcccaaccattcaaaaggctgaggcaggaagatcgcttgagcccaggagttagacgcagcagtgagctatgattgtgccactgcattccagcctcagtgacacagcaagaccttaactcaaaaaaaaacaaaacaaaaaacaaaaaaactagaaaaacaataggaaaaatttaaaaatctataaaaacaaaagttggttctttgaaaaaattaccaagtttgacaaactttagctagactgaccaagaaaaaaataaaattattaaaatcaggaatgacatagggaacatcactaccaaacttacagaataaaaaagattgtaagggataatatgaaaaagagtttgtggccaggtacagtggctcatgcctgtaatcccagcactttgggaggccaaggcaggaggactgcttgaggttaagagtttgagacgagcttgggcaacacaatgagaccccatctctaaactttttttcattaaaaattagccaggtgtggtggtatgtgcttgactcccacctacttgggaggctgaggtaggaggattgctggagcccagaggtttgaagctgcagtgagccatgattgtaccactggactccagcctggatgacagagcaagaccctgtctcaaaaataaataaataaataaataaacaaaacctataactgtttgccaacaaattagatgacttagataaaggagacaaattcctagaaaggcacaaactaccaaaaccaactcaaaaagaaatttaaaatttgtattactgaacattttaagaattaataccaaatgttcacaaactcttccaagaaacagaagaaagggaatagttctcaattcttcctatggagccaatagtcctccgatatcaaaaaccaagacatcacaagaaaactacagaccaatatctcttataaatacagataaaaaatcctcaagaaaaactagcaaaatagaatccaaatctactgatgaatggataaacaaaatgtggcatattcatactatggaatattactcagccttaaaaaggaatgaagtagccatacatagatgaaccttgaaaacattatgctaagtgaaagaagtcaatcacaaaaatacaatatatttattgtatgaaaacagtttcatggttgcctaggctgcagggctggggacgaggggacacggggagggttgtttctggaatgagacatgactaccaacaggcatggggtttctttccggggtgatgacaatgttctaaaattagattttggtgatagttgcataactctgtgactacattaaaaactgctgaattatataaattcaaattcaattcaattcaattaatttctataatacatgaaatacacctcaatacagctgtttaaaagagtccagtgataggatgtttagaagagccggcaaaagacaacttaggcaggataagcattagctacatagctggctgggggtgggcgatagggagagatattttaggggttcatttcattgaggtgttccccattttggttccaggattcctggggaccaaggagggtcccctacaggtacaaggaccacagagtaacaagatgagaaaacacacctccaagcctcttcttcctcttcccttcgggagttcagacctctgaagctctctaggagacttgctgccctaagggccgaggtcagggacttagggcttcctcaggattggttcctctctggagccatgagagccaaccccctaaccctggaggccagcagcgttgaccccggctatgtgctgtcgagcccccaccctccagctgaaaggccacaggactcctctccaagcaggtaggagggggtgccgggacttctcgtgtcctgttgctaggcacaccagcagttctgggtttcctcagagaatcatcaaagttcaagccaccagtgacctagagatcatcgagttacgcttgtttccctctttccagataaagaaactaaagaaactgaggttctgagtggcagggagctgggacgactgctggcatttctgacagtcttgaggcctgcgtgcctatccccattgcaggtgggagggcagaggctcagaggtgtgagggggaggcctggctaggaaatgaaaccaaatttctctgctggatgctggttccctttttgaaaaacccccagggctgctgtgcaggacaccgagtggagaagaagtcacaaagagcggcccttctcagaaatcgagtggagccagaagcctcaaggttcagtctcctgagcaaggcccgcaggacggcaaggctcgaccacatcccagcatgtggttccaggcctcagatctgtccacgtcagcccaccactgccttcaaagtcaagtcagacatgagggctgccacctcgcctggcctctgccagccttcccagcagcaagcataagacagagtctgccctggccttcagggagcttctggctcacttagtgagggaacagattgtgcaaagtaatgacacatgtatatttacacattatggtaagtgttttaaaggaaaaatacataatggcaagtgagcaaacaacaggggtcagaaaaggcctctcaggaaatagtgacacttaggcccagacaaacaaggagcaaggtgacttcaggcagagagaaatgagggaagcaaaagcaggccacgtgtgagaggaggatggggatgtggggagctggagaccacatggccagcagcgtatggcactgagaatcaactgtcactgccactggaaccactgagcatgcagtgagcaagtagggagcagtgagaccccgcaggtgacctgcacaggccacactggctactggagaagggactggagttgaggagggtccatgtgggaggccttgttgggagaggccactgcagcagatggggctgcaggtgctggcatagcatagagacagcagaaagattcaagtgcactttggaaatagaactggcaggatgtggggatggcaaattggaggaaaaggatgaaattgagaattcagttttagcccgattagctttggccaatttctagcccaggagacatccaatggaggtgtccaggggtcagaggcctgagccaggaaagtgactaaagattctgatgagtttgccagccagagggccgagcaagcaagcaagaagcatcagaatgtgcaggcccctagggacaggagcagagacggaatggcagagcaggaggcagccactgtgctggcctgaggactgtggctccccgaatgctgcagcagaacagcagaaccggtcctatcacccagtcagtaacagccatgcctcctgacctctccctccaagacagagcagggcactctgtcccctcatcttgcaccagaccagcaacagcattcctgcccaggtccactggcctctgtactctggctgctgggcaccccagtgagcccaagcctggcagagcctatactctgtccaccagcaaaggggcacagggtctgcaggaacccatgcccagagctcatctattacaatgcagtgataaacacagtggactgccactgggatctgctgggtgttgggtaacccaacaataggctggggccagccagcaggtgagctcaatggtttcctgtctctgcccacactctgctcttgctactgttcacaagtacagattctgtgctagtgtggtgccaggccacataggtgacaaagtgatccccagcggcagacccaggctcaccgcaccaaagggaatgaaatgaactgggcccgagggctggggctcagagatggattcgggcacaggccacctgcccaggctcgactgccctcaggcccatttgatggcatcttgagaggaagtggtgtggtgcggaaaccagagaggtggtctggggagcctgggagggggaggggggaacacagtgccagcaaggctgggaagctgagccttttctgcaggcagtctggggccaagcgtggggtttgaggaggatcatagtgtctccagagctgtgggtggatgctggcttgggcagtggactagaaggggcaagggtgaactcaggatggccagccaggaagcagtgccatcaaggcgataagtcgagggaatgcacaggtgttgcggtggcctccagggcaggagcacaggagccatcagccattggttgtgagaaatgaagaagagggcagggtcgagagccaggaaagcagaagaggcagtgggagtgcgggactgcactggagtctaatgaggggctctggatctgcaggccgcagacaggcactgcagagcttggagagggaatctcggaggcatttgtttagaggcaatcacagtcatcagggccttgagggagacagctcagaaggtgaacaaacttatagccaaaagccagcagggcagggctgccttcagccctggttctgctgttctgctgcagcattcagggagccacagtcctcaggcagccctcagcagcccaggaggggcctaaggggagcaggcccgcaggtgctcagagcgtcagaactggtcatctggtccagtgcagatgatctccttcaaggcagagcctgacaggggggccaggatgagtggggaggaggacaaaggggattcagggctgggcacactgttccctggtgctgggaaaggaggggaggaacaatgggcagggcttatggagcatagacagggacaagaaattggtcttgttggttttgtttttgaatttttggttgagcaactcaggcaggtttatgggctgacaggagttgacgggagggagggtgaggatgtcgggaagagcatgggacctggtcatgggcaaaaccccagaaggcaaggaagagctgctgctgctgagagcagcaggaagggtgaggggcgaagagctccaaaggcagctggagatgaagcggtggcagagaatgagcacgtgtcaggatctaagggcctaccagtccgctcctgcccctcgctgccctggaacaaagctgactccatgctgtgctccagtaccaccttcttcctccaaatttccaccttgggtaacaatgcaaagctgaagaaaatgaaatttgccaccaaacagacccatcacagagctctaaatacagatgcacctggaaacatgccccagaaacaataccctcggagttcagacaagtacatgagccctctgcttttagaggaggcttatcctctacaaatcagatcctgctcactgacctttcagctttttgggagcacctggaacccaggatttctctatttgtgaaaacctgtcttgcatatgatattaagtgggattaatgtcacagcatatcacaccctcccctccccgaaaaaggcacgcaacaatcccttcccggacccactgtgcccacctacagctttgcagccagcaggagagcaaggggctcctggataaagcccaggatttgggttttaaaggcgtgatgatgacacctactaatgtggctctggctcttgatatatttttgctgctctcttcatgagattatagaatatttcagcttttctgctttatcaagtagatttttacacagggacaaacatgctaaaatgttctgttgtaagagtttgattcatccaagaatgaaatcaataagaacaactgttgtcttagctgttgctttaattgaaatgatatcaatgattaatggactctctttcaagcttttcttaaaaaaatgcacatacacatctctaggctagagagtcagatagctccttaggtgggtggcaagagctaaacacacacatggatacatacacagacatactgtgttactgctattacaaccgaacagtttaatgtccaaagcagcatttctcaaagtgtgtccacacatatgtgtgccatgaaatgctctatgaaaagaaggttccctagggaaaggtgtggagaccatacctccaatccacctgacttagcaggcacaactgtgccagtgtggcaaaggctctgtttgctgtgaaaaatcttccaaactttcataattccttatgtctaagattatttgaccaaataacccttcccgtgtttattgcagaactaattgtgaacaatggttcagactgtccgccacccagccagactggccacatgggttcaaatttgttaaatgagcctgcagcatttaaacccttggagactttgtacactaagacatcaaacatctgtcttccttgaacctcagactctccaacaattgcatgggttctctcctccctgccagacagtggctggtcatccactctggcaccacagcgctccccacccacttggccagcttggctaacttccatgggctgcagaaccttgtaggcacttcagactcagtgcctactcccaggctgctgtggccagccatctctcgggtaggtgggagggtagggcccagctggggaacactcccagaccaggctttttccttacctggactggtgaagccagcagctggccttgggggtccacagccccagaggacagacctaagcaagaggaggtgcccctggctctcttctgaggctgcttaatgagtctatgtcctctctaaccaagactttgtaaatccacccttgcttttgggacactctttaccatgtttactgaagaggggtcaggagagactaaagctgctcgtccaggccctggcgggggtgaaatcctgggctctgacctgccctcggggagcatgcagcaagaccttgccctctaaaccctactgcagccctagctattgtcatagtgaagacaccacacacagggctctcggcccctgcttccaagaatgaagcctcatgtgcaaaattctttttcattctttctacaatcagaagctgaggaaactgttgctctgggacaatgagaaccttgcaactacagcactcacatttttcacttggttttggttgcaaagaggctcaaccacagatcatacctcatagccagattaactgggctccattttcccttgacctctctacgtcctgtgtaaatgtggggtcctgtttaggtttttaaatagttaagtattatatatgttataagctacttcaaaccctttgtgaaaccagcctgtacattgatggcaccattctcacctggacaaggtcgaaggctgcctgaccttttctgtatctggatgcagaatacacttttcggaggaaggaagacctagtgctcattctggcagagcctgccttaccctatatggtttacaggcaaggcttcccagactcacctggccataggagtcacttggggaactccttaaacacacagtttcccaaggccttccccagagcctatccagcaggccagggtggggcctgggaatctgcatgcttaataagcgcggcaggtgagtgttagggtcaggtgagtttagggagcgctgcagtaaagggatgcaccactatgttcccaacgatcaacagggatcatttcagtcagtcaagggttaagtcggccgggccccagcccccgggaggccggacctccggcggccgccaacgtcctaagcgtgtttctgggctttgggccctctccaagactgctgcattcctcaagcagctctgctcgcaggttgccgccgcgagttttggaaaactctgagtcagggccccaccgtccaagtttgtgacagaggcgggcgagaatgaatggtccctctcccggcagttaagccgcaggggcggcgcagggcgcgcgccgggctcgcggtgcagagacctgcgagcgggtctgggcgccgggggttcctccgtcccggccgtggacttggcggacctgcagccggcgccgcggccagccccgggccctggagggcggaccctcccctccgctctacccactcccgcccaggggccggaccccacccccactcccacatggggaccgaggagccccaggatgcgcccccgcgccccgagtgaaggggagcctccccttccaaagttaggagactcagaggagcagcagccgcacctgagccctttccaaagctgaggcaggtgcgggcggccctggacaccccgtggcgagtccccgaggcggggctggcagcctctggcggcggccgcagggagcggggcgcacgtgcgcgccggagttacctttgggcgctcgcaggtgtcccctccagtccttgcagcagcacagccccatggcagccgcccgcggccccgccgctcggctcctctccccgcctgccgcctgcgccccggggcggcgcggccgaggtccggcccacgggcagtgcccagctgggcgcagggtgcgcgggaccgccggcccgcggctcccgggccctcacactccaccgcggccccgcgcagcgggcatgccggcctccgggcagaccctgctaatcaataggagaacgcgcagatcgcgaccgccgcgccactgcccgcttttatctccgcgcgccggggcggccccgcgctgctccctgccctcgccggcgccctccccacggcccgttactctcccggggtgccgggccgcgcgctctcccaggagccgccagggggcgccacggagccggggctgcctccgcctccctgggagccaagcaggggtggggggccacaccggcctggcctccccgcgcagaatgggaagaaggggcgccctcgctgtgcaagggagacgcccccaaccccaccagcatcctctgggcagtcatctcaagggtgactttgtcgggggtgttcaggaccaccgagctctcagtttcccagctcacctgtactgtgcagtagtaggaagagggagtgtttgcccaggctaccctcaaacctggcgggctacttatgagctgtgtgactttggataagtcatctcccctctgagactgtttcctcacctgaaaagtgaggaaaatgataccggttcagatgctacttagcacaaattaagaattaagttattcaaactctctctgtgcccagtttccccacctataaaacagagaagataacagaaactgcttcaccggatggttgtgtcaattaaatgagttgatatatacaaggacttagaacccaagtggcctgtaggtaagtgttttgcaagtgtgagctatcatcatcatcaagtcttggagaggatttgggcactttttcatgagagtgtgttcggtgcaatcaccttggaaggtaacatggaagctgctttattaaaactaaaaatgctgctgccttgggagcaagctcatttcttagtatgcaccccatggaaatgtgtccccacatgcccaggaaagtctatggaaggctattcatggcagccttgcttgtgattgcaaaaagttggaaccaccaaaatgttcatcagtaaaagaatcatcggccgggcatggtggctcgtgcttgcaatcccagtactttaggaggccaaagtaggtggatcacttgagcccaggagtttgagacctgcctgggcaacatggcaaaaccccttctctactaaaaatacaaaaattagccatgcatggtagcgcacacctgtaattgcagctacttgggaggctgaggcatgataatcacttgaactcgggagacagaggttgcagtgagccgagattcggccactgcactccagcctgggtgacagagcgagattctgtctcaaaacaaacaaacaaatgaaagaattatcaagtacactggaattttcataagatggtatatgatataaaaggagagtgctatggctgaatgtttgagatttacggattcatggcacttatgtaagacacatacccatactcacaaaatattactatagtgttcactctgtaccatgctctgttctaggcccttgggcttagaaaaatatatgggaggaaaacaggaaaccaagagtggttccctttggggagatggtggaagaagaatggagtaaagtgggtgtcaagagactttggcttttttataatggcctcattctgtaaaaggaaagcataatcaggtattattgtgtaattaaagtaaataatcaatttactttgattgagataattatatttttaggtgtttggcacagagtaggcttcttcatgtaaggttctttgtcaccccccagttcctaggatctgttcctaaccctgaagcagggctgtggtccagctctgatggccttgacttgactggaattttctccctccctccctaccacaattccatttggggagaacagaggtggtctcagaggagaatctcagcaagggcaggctggaaagcagaggctgcccaaggcacggagcagaagagttaaataaatgtgggggcaggaaagaatgacttagagcagggaagaggttttcccaggagttaagtcttcattcaaaggagagattaacaagagcagggcagatttctgcctccctccctctcctttaactcctcagaaagaccagggtgaggcttcggggagagagaagggttttcctgcgttagatccggaaagaaagatgttttcacttcatgacacataggtgggggttacaaagagagagtaactgagaaaaaacagagagacctgacttctggttgctgccaagtcattttaaacagttttagcaccaggcaagatcacttagtcacagcgggcttaatgaggccccaggaattccaagctagagctccctgcattcagggagagcatctgcggggagtgagcccctcgggtgattgtccaacggccaagtcctacatttggaaagcaagatttaaaagaaaacatcacagcggccattgtgggccgcttgtttatctttctgagaggaagtagcaaagcaggatcgtttcaaatgagcctattataaagggtcaacgtccccattgaaccgtttaaatatattttgggatactcgacttttcaaagcggctttaaatatcaactcccaaggcagttcagcagacaaataggaaggcaggggcttcttgttttattgcctttggtttcacacactttaattcctaattacacattgtctttttatagttttttagttgtgtgtccttcctcaagggggaaggaaaataacattcactatgtgtttcccaccatgtgccaggcaactcacaaaggttatctcagttaaccacaggacaaccgcatgaagcagatgccatgagattcaatttacaaaggaagaaactaatgttcagaaaggtgaagagacttgcccaagaccaatgaggtagtaagtggcagagccaagatggatgggtggatgaatggatgggtgcatggatggatggatgggcagatggatgggtaaatggatggatggatgggtggaaggatggatggatggagtaatggatgtttggatggaggtgtaggtaggtgaatagatggatggatgggtggatggttggttgaatggaggtgtggatgggtgaatacatgaatggatgggtggatggatcgttgattggatgtaggtgtggatagatgaatagatgaatggatgggtggatggatggttgcatggaggtgtggataggtgaatagatggatggatgggtggatggatggttggttggatggaggtgtggataggtcaacagaatgatggatgggtggagggatggttgaatggatgtgttccataggtgaacagaaggaaggatgatggatggtttaatggttaaataaacagaagaatgggtagttttccctagttaggcctaaagtcatgggctgcgactggcaaagcacccacttagcatagaatttgtctgaaaaatcaaattttctgaacatagctctgccacccaaattgatgatgaccccaaactaactagaatttagccaaaacatcaggatcacatatgctgcaaggctctagctgtgctcaagccgccttgctccagaagaagggccagaggtgggagcctctaggacatgtttcccagcaggaaggccagcctccagcccaccaccaggcacagggcagaagagatagaaccagggggtggatatccagtgggcacaatgggctctgggaggaggctggacaccagctttgaggacaaagtttctatgggatagaggctgccccattcatccagagctctacttcctgccactttactccatttctctgggagacccacagttgggtggtgagaatgtcaagctgtttctagggggtgctgctgctgctgggatcctgaagcctgtgcagcctgagcccctggtcccagatatgccccaggtcattcaaggattttcttaggagactcaggacctgccctccatagttccaatgcaggagtctggattgctcctccccagaatatccaaggcaccctcacagcactatctcaggtgtgagctcagccctgggtagctcagaggaagggaataaatgggaatgtaccatcttagccacaagcatagcttagggagcctataatgatcattctttccttcactcatgtacaaatgatgactgaacacagctcaatgcctgacacaaggcccaatgtggggcgggggataggaggttgccccgggagctgtaggggacagaaagccagtctgccgagggtggtaaagaaaactctgcagaggagaatgctttgaggtgggacctgagctgcaaggaggggtccagcaccttaggggacagcacaggaatggtccctgatatggtgtagacgtgtgtcccctccaagtctcatgttgaagtatgacctccagtgttggaggtgggcctagtgggaggtatttgggtcatggggctgattctttatgaatggcctggtgccatccctgtggcaataagtgagttctcactctggtagttcacatgagggctggttgtttaaaagagtatgagatctcctcctttttctctctctctctctctgtctgttactttcttgccatgggacacatatgctcccatttgccttctgccatgattgtaaacttcctgaggcctccccagaagccaagcagatgttagtgctatgcttgtacagcccgcagaactttgagccaaaataaacctcttttccttataaatgacccagtctcaggtattcctttatagcaatttgcatggactaacacagtcctccaatgggtgcagtagtatcccattaagaacttgctctttacttgggtcaggggagtcacaacatggcatttagggtagaagacatgatgcagcctgtgattctgactggctagcctggtggctagagcgagatagggactggaagggggagactggagcagagaaaaagcaaagatgcaaaaggcataagccaggtgagagatgtgggccgaacacaggttggaggagttggagaccaggcagggcaatgtgttagctcaggggccccagctaaccacaccttccagttcttgcatcttatgtaatcccctccctcgaatctaggctgccctatgagctgctttaattgacagaaggtagcagaagtgactctggaccaattctgggtctaagtcctaagaaaacttggcagcttctgcttttccctgtcgtcagggaaagcacccccttgtaaacagtggaattgtcctgagactgttgtgctgcaagaaccccaacctagcaatgtggagaggccaaatggagaactgaggtccaagccagcaaccacactgacttccagctgtgtgagtgaggctgtcctggaagtggattctccaagtgataccatgtggagcagagagaagctgtccccaccaagccatggccacactgcagaacagtgagcaaataaaatgtgttttgtttttagcatggtactggtataaaaataggcatatagacgattggaacagaatagagaacccaaaaataaagccaaatacttacagtcaattgatcttcaacaaaacaaacaaaacataaaagtagggaaagaacaccctattcaacaaatggtgctgtgataattggtaagccacacatagaagaatgaaactggatcctcatctctcaacttatataaaaatcaacttggctgggcgcggtggctcacgcctgtaatcccagcactttgggaggccaacgtgggcagatcatctgaggtcaagagttcgagaccagctttgctaacatggtgaaaccgcatctctactaaatatacaaaaattagccaggcatggtggtggtcatctgtattcccagctacttgggaggctgaggcaggagaattgcttgaacccaggaggcggaggtttcagtgagccaagattgcaccactgcactccaacctgggaggcagagtgagactccattgcaaaaaaaaaaaaaaaaaaaaaaaaatcaactcaagatggatcaaagacttaaacctaagacctgaaactgtaaaaattctagaagataacattggaaaaacccttttagacattggcttaggcaaagacttcatgaccaaaaacccaaaagcaaatgcaacaaaaacaaagataaatagatgggacttaattaaactaaaatgcttctgtatagcaaaagaaacaatcagcagagcaaacagacaacccacagagtgggagaaaatctttgtgatctttacatctgacaaaggactaacatccagaatctaaaaagaactcaaacaaatcaacaagaagaaaacaaacaatcccatcaaaaaatgggctaaggacacgaacaaacaattctcaaaagaagatatacaaatggccaacaagcatatagaaaaatgctcaacatcactaatgatcagggaaatgcaaatcaaaaccacaacgcgataccaccttactctcacaagaatggccataataaaaaaataaaaataaaatagatgttggcgtggatgtggtgaaaagcaaacacctctacactgctggtgggaatggaaactaatacaaaaccactatggaaaacagtgtggggattccttaaagaactaaaagtaaaactaccatttgattcaacaatcccactactggctatctacccagaggaaagtaagtcattatatgaaaaagatacttgcacacgcatgtttatagcagcgcaattcgctattacaaaaatatagaaccagcccaaattcccataaatcaaagagtggataaagaaaatgtagtatataaataccatggaatacttcttagccacaaaaaggaacgaaataatggcatttgcagcaacttagatgggactggagaccattattctaagtgaagtaactcaggaatggaaaagcaaacatcgtatgttctcactcataattgggagctaagttatgggatgcaaaggcataagaatgatacaatggactttggggaattgggggaaagggtggcaggaggctgagggataaaagactacacattgggtacaatttgcactgctgaggtgatgggtgcaccaaaatctcagaaatcaccactaaaggacttattcatgtaataaacaccacatgttcccccaaaacctattgaaatacatttttttaaaaaaggaaaatatgtgttgttttaagtcattaaactttggagtagtctgttaggcagttacagatagctgaaacataggaagtgatgcaaaatccttatggctagcactgcctggccctgacaatgtgccaggctaagagcttgacatgtgcacgttcacttagaattcagagcaatcctatgcattcgatgtcatcattatttccacttgcaagaggagggcaccgaagtacagagaagtgagggcaccgaagtacagagaagtgaagtcatttgcacaaggtcacaacagctaattagtggttaagctcagattggaacccagcccatcttgctttctagcctgtgatcttaacaattctatgataaatgttttttggggaaaaggaatgggactcgatggtgaataagatggcctgtgggacaaaggcacacataactgtagttgagacttccagttaaaaaagacaagccctgtggagtgctggattgagaccgcgggttattgctcctagcttttcagaataatgtctgtctcctgccagccctggcctctggtagagggagcttgttgaagaagggcgtgatgtagacactttgtagacagcttatcacaaaacatacctttgattggcactagtaactcacgggcattattttgtttaattttcacaatagcctgtaagggtgatatgtcatcagatccaatctacaggtgaggatatggacacccgcccaggttatgcgagctctcaagatcacacagctggtgggtagagggtagagcctgtcctccaatctgggcagtctgaacactgctggtcaccttcttaacaaccactcactgacttctgcctcttggtggtgagggtctcatctgggcctgcgtccctgcccccacccccttctcccatcatatttctgatctatattaggagtttggctaaaattcagtgtgcacacacactgtatgtccacataacacagacccacagacattggaattggaaggttctcttttaacacaacctcctcatttttcacaagcaattttttttctttttttattatactttaagttctagggtacatgtgcacaacatgcaggtttgttacgtatgtatacatgtgtcatgttggtgtgctgcacccattaactcttcatttacattaggtatatctcctaatgctatccctcccccaaccccccaccccatgacaggccccagtgtgtgatgttccccttcctgtgtccaagtgttctctttgttcaattcccacctatgagtgagaacatgcagtgtttggtttttttgtccttgtgatagtttgctgagaatgatggtttccagcttcatccatgtccctacaaaggacatgaacttatccttttttatggctgcatagtattccatggtgtatatgttcacgagcaatctcttgagggcctactttgcgccaggcactgtaaggtgagttagtgacaagttgggcctgtccttattgaactccagtttttgctctgaaacaaatagatatacagaagtgataagcagaaatgaggcttcttacaccctctcaaaatgttttatgcacttttagcacagtgcatggaagccaactgctttgccttctgatatctagttcaatctctggccagacatattaacaagaacccctgtccccgtactgaccctcatcaacagcattgctgttgctattcattttgcagactcattgttctgttgtttttttttttttttttaactaagtatatgattctggggaaggtgggtattactctttttctgtttgaagcaagccccatacatctttttctagagaaaaagctctagatcccataaggactggtattcttttttctttctgttgatgagacttgtctcatttctctttttcctttggcttccaggaagctcaagaaaaatttaaagcctggctttggcaaatatgtaggtcctaacagtcttcatatttgtgttgtggttcatgattttgagttgctacttttatttgcattttctcaggctctcaattattttgaactattgtggtatcactattttattctaagtcttctcaatagaggccatttcaaatcctgtgtggaataacaaaggagtaaaccagaagtcagtaaactttctctaaggggcagatagtaaacatatttaagctttgagggccatacagtctctttagcaactactcagctccaccattgtggtgtgaaatcaaccatcgacactacgtaaatgaatgagtgtggttgtgttccaataaaactttatgtacaatagcaggtggcaagccagatctggcctgtggactgtactttacagtgttttaaaagaattttagagcatctgggaagtaatttcctcttaagtcgggaagtacttggcttagaaaaaaaaggaatggatgggaattctctccaagatgtctagtctccacttccaggtgacagattgtggaaaagcagctgtgaaagctgtctgggcagtttggttcaggagaggagagggccgtgcccaggaggggtcagtccctgacagagcaagctgtgaggtctgccagtgagagtgcattctctggcacactggcagtgcccactccttggagggggaggcagtaggggcagagctctagaagtgccggccagccaggttccccagctcgggccaatgggccttcagctgccacggatgctgttcatggaaggaatgtgtctgcagctccaaattcccacagagaaagacaaggggaatcgttggggagaaattcctgggccacatttttcttgctgttcatgtggcctgaagccattgaacttggccagcctgcccagggagggatttacaaagcccattgtcctttccctgaagcctcacccccaccctgcccccacctgctctttccaactttctttcctcccccacccccaggagaaatgcagcatgggaaagagcaggaggccatggggccaagagggctctctgtccttgccatatggacaaacacagcagaagctcccaaaggggacaggtacttcccagcagctgtgatgacatcagaccctaccatgcactcagggtgggaggcggtctcggttacctgagcaggaatcacttagtggcatacacgccacttactgtatgccaagcactgttctgagcattctgcataaattaactcattaatccctgcaagaaccctatcataatctccattttacagatggggaaactaaggcttgaagtggttaagtgatttatgtgggttccaaatagtaagcggaaaagtcagaattagaactgaggtgtctgcctccagggtgatccttactttcttacttctcacttttactatgtgtgacccctcagcttagcattctatttacagatatcaccttaatggtctgcagttataggaaaaattcattttacaaagcatttgcagtcagtcctgcacaccttttaaggctcccagcacccccatgctatagaacatgagaccctgtatatgaactaggcccatctggtgtctggtccacttagctggggcatagtactgtgcacactgggagttaactagtgctccttgcactgttgctgctgtggctgctgctgacactgtaaggagggacctcagttacctagaatgtgtcagatcctgggtttgtgttttcactgaatcataagtcattgacacaacaaccctgagaatgatgttgataacctccttttacagataaggaaaccgggcacatcaatcaggtaattcatgcttgctgctctaacagctcccaaatctcagtggcttaatcccctaaagactcttcttgctcaggtcactggctcctgcaggtcagcatgaaaagggaagagggagtggggctgctccatgtggtcactcagggacccaggctccttctaggacctcagtgtcctcctctgaatcctctgctgtgagatgcagggagagggggcagggagtttctcaagggattttaggagctggtgctgacagcagcctcagaagcctcagaggtcacctgtcactcctacctgtgtttccttgaccagggtttagtcatgtgaccctgtcttactgcagggaggatgggaggcggagtcaatctttgcagctgcaagagaagcagaggctttggctgccacaccggtccagaggggtgaggtgctgtaagggacagtcagaacttttggcacccaagctggtgcgttgccaccacactgctttgactgaaactgacgccaaagctatctgaattgaattccaacttctaccatcttgaaagactctcagttcatgtggacaacgaatggggtagaaggccctgagggttgtcagcattggctgtgatatgaaaaaaagagaatggcacatggcaaatgcccgacacccttccctttctcagtggagctgtggccaggtgtgctcacaggtggaggggcgggaattgggagagtttctgccctgaggaaaggggagcatgggcgcttgctgtggccacctagctgtggaaggagaaaggcgcaggatggggcccggcagaggctggcctgggtcctgttcaaagcatagatagatgttggggtggggaaggtcccttgttcctcggggttttgctgcagaaactgcaattcttcgagggtgttctgccttctgagaatacctccacactctgctcagtcttgagggggaggtctctgccagacgagggcactgggttgccccaggatgatgggcacagggtggtatcttccaagctggccttggtgttgccaatgagaggacagctgtatagaaatagggggttgagcctgtggagctgccagcaggggaaggaaagggctgccaagtctctgcaggatcaggcaggggaccttcatgctagaggacaaagtttgcaagctcttgtgccctcgccactattttccgggctgagttggcctcagatggccaggtcagacccagctctactgttgcatagctcagaagaccactgtccccccacctgctagttactcagtaccaagttggctcactcaacctccagtgcctctgtttccccacttcctacagccaggcctcaatccacccaacagacctcctgtaaaccaaacctcaaaaaacatttttcagactatggacaccagttcattagaggggtcatgaaatcaattctgtgggctttgtctggaatttttaagaaggagatagactcacataggacagaacatgccagaaggcactgcatgtaggaacagcggtgtttcctgaagcctcagcttctgttgccctgggctcccagggggcaatgtaatgtctatttcttgtcaaaaaagtgtgaaaacactgtgttggtgtatttgtctcattcctttcagaaaacctgggctctttgtgcaaattagtccacaaatttcttttcctccccaagctctctcaaccaatcacccctcttctgcaggccaaagaagggcacaatctttgccaggccactcaataaaaaaaaaaccccatcaccaagggctgcaaaaattcctgttatacaggaatcccaggaggccggctgctttctagccttgcatttgcatatctaagagggccacttaagtgacccttcacaggacaaagaaggttagcttctcttaatttttaaaaaatgaaaagaaagaaatccttctggtttccacattccttcagggcagcccttgcggggtggctggtcttgcagctctgctctggtgcatcagccagagggtcctctgcttctccagcgttattcctgccaccaggatttgtggagccctgctctgtgccagacatggaagactgtggaccagagccccttcctggagccctctcctcatcctcgggctgtgtacatgtgatgaggataagtggctcacatccctctccagcctcactatgggtgtgttgctcctgtccccacatgctccagctctgcccccaagcccatcaggggaggcctggttctccaggatgctggaattctcagtctttcctatgctgacttgacgggaggttctcatgtttattgagcatctgctgtgtgccaggcactgctgtattccaaaatgtctgccaagggcctgcaaaggtcattactgtcaccatccagtgaaactcaggaagatgaggtgacttttcaaggtggcgcacacaggggggaagcagcaggtcctctcctcggtctcttggatgcctgcagctctgttcttcccacctgaccgcaggcctccgggagcggcaccggaagtcccaggggcagtgcctcgggccaagtaaatgatacagcatggctggagcagcatgctgcatggatggaggtgctaggcagagagggggtgcaggaagatgggagacccgccaggagtggacagcaggaacaggagcttggtcttccggcccctgagagtgtggactggattccaagactagtgagcatgggccctgctgcggagggccagtggccctggcagtgtcactcccaatgccacaatggtatgagttttccatagggatgccataactaactcccacaaactgggtggcttaaaacaacagaaacttctttggttagagttctggaggccagaagtccaggatcgcggtggagctctaaaggcttgagggaggaatccttccttgcctcttccagctgctggtgacttccaggttccctagaaacccttggcttgtagacccatcccccagcttctgcttctgtcttcacatgaccttcctccctctgtgtctctgtgcatcctgtctgtcctctcctctgcttctaaggacaccaaccattggatttggggccgctctaattcaggattacctcctcttagctcattgcatctgcatgaattctgggggacactattcaactcaagacaacaacttcccttctttcctaaccttggcctcccaaactctgtcccctcaatctcaagtcaacagaaaagcatcagggagagctatgttcttggaacccacgaaggcaacggactagcagaagactctccagacctggtgtttttcagtaattgtaattccagtttttgggattctggtattccagaataatgtgcttttgagaaatgctgaactattagtatttttgtgacatgttttttaaaaattagaaccatttacacctgggaatgcactacagtaggcgtttggatccagtaaaggaaagcttgtttagaaagcagttttctattcttccacaacccagaaggaggggaactacgctgcctccatcatgatagaaatcttcactctgcttcagagactttccagcctggaatttgctccaggtgacacactggcatctccacctacccatattaacactggagaagatgaccacaaaccaggaatgctttctctgaaataaaactaaagctcatgatcaaataaaaaaatgtagttcctgccaacaaaaaagaagggaggttaaaataaaagatatcttctaaagtggggaagaagaaatggaattacttgaagatgaaaaactcaaaggataatattggaaattagtttgaaatttagcttggaacgtctcaccattgccttgaccagcctagagtaaacaaaaggtttcagcagccggaaaaaatgggcacaaaaatatgctcatgatccagataacatcaaatagtagattttcattccaaatattattagaagtttctttatcttgtagggtttagttcattacttttgaataatattttattcatgtcatctgctaacaattagtatgagaagggtaacattttttttttttttttttgagacggagtctcgctctgtcgcccaggctggagtgcagtggcgcgatctcggctcactgcaagctccgcctcccgggttcacgccattctcctgcctcagcctcccaagtagctgggactacaggcgcccgccactacgcccggctaattttttgtatttttagtagagacggggtttcaccgttttagccgggatggtctcgatctcctgacctcgtgatccgcccgcctcggcctcccaaagtgctgggattacaggcgtgagccaccacgcccggccaacatttttaacatttatatttcacagatttttgttttcacttaatgcttctaatatttactttttatttgaaatgtctaatattttagctgaattttaaaatgttaggcattctgaatacctttccatagaaaatattgataatcagtgttggtattttagcaatgtagggaataaatacttgtattccttcatgttgtttttctctggtactgcaattataatgctgtgctaattagctattgttaaatagctgtaaattaatttaaatacattgacttataataaattttttaatttaaactaatttatagcctttaccaataactaaccatgtgccaagcaacacgtttaacatcctacatggaactacttttgtcacggccatttttcaaataaggagcctgaagtttacagggttctgtgactcgctctggacctcagatctggggagaggctgagccgtgattgaaactcagacagtaagactgagcacctcacccttaaccatgaccccacaggacaaataattaagagtgtcaaataagtcagccaatacataataaccatcattttctagccatctttgcttttgagtttattatgtgcactagtacacacagactctaaccccatagagatcaggcaggtaagataaactgaaaaagcagcttttgctcttgctgcccaggctggagtgcaatggcacaatctcggctcatcacaacctccacctccagggttcattctcctgcctcagcctcccgagtagctgggattacaggcatgcgccactgtgcctggctaattttgtatttttagtagagacggggtttctccatgttggtcaggctggtctcgaactcctgacctcaagtgatcctcccgccttggcctcccaaagtcctgggattataggtgtgagccaccatgccctgccagctcctgtcaattctttatatggaggaagcaggcccaaatttaccctatagaaatctatatatttttagtgggtaaaatcctgtgcattgaaaatattgcatgagccaaacaaaatatgtctgtgagccagaatcagcccatgggtagtcagccctggcttgcagctcagtttgcagcctgagaactagactccatttcttgttattgttgcctctcccaaccatgacttttagcattctttctgcttttggatgattgctccttcattggtttaatttatcacgcacttttaaagaaccaggcaccttaaaagcagcgctttggagcaaaacaacatcaaggctactcaaccccggactaggagttcttgagggaggggatcacatctcaggatctcctagtccagggttgggtaggcttgatgttgttttgcttgaaagtgctgcttctccaattttaagatgcacacagagcacccaggacaaactgcaagaacacagattctgtttgaggtggcatgggtggggccccagggtctgtatttccaccaagctcccaggtgatgctgatgcagctggcccatggaccacacgtgcataggaagaacctactctggggagcagcctatgtctcagagggttcctgagctgacagttggaggaggctctgtacttgggtttggtttctcagaggtgacctgggtcattcaacccccacctactaatcccctgccacattcctccccacatcctaatttatctagggatttagtctagctgagatcactcataaagaattttatctacatctttgttctgcgctggcacaagcatacctcctcctgcgcatcaccccttcctgcccggtgcgctatcaccatctgagggacttctgtgcacatccttctgtgtctctgtgtcacagaaccgtggtgcccagcaccagcctgatcttcttgagcctcctgctaagagcatgaccctgctgagagtcagcctggagtctagatccatgcagctagcccgctgcaggacaggcggcatcctggagcccccaaaggcaatggaagtgtccccctgtgtagaacaggctgtggggtcaggcaggcaggcagagtgtcacactaaagagagaggctgggccagtgcactggagtatagaccatgttatgcacccaggaagccaagctggtccaggcaggcagtcctattggtgggacactaaaggcaccttccagttggcatcattcaagagatgtggctgaagtttgatcacctaattgggaccctggcctcgatctgcaaggatgaaggtgcaggccaccctccaagggtgacattacctattgagctccatggggggagttcagttaaaggcccctttgccgtattggatcaggaagagccacctgtgaagtgtatgctggagccttgctatcagcaggttggacaggagaaggctgtagggcaggggccgggtgctggagggaagagcatggcacgagaatgtggtgggagctgtgcatgcccagcccttggagaagccactttccctctctggatgtcaagtttatgaatgagatgaggaccatgataagatgtgcaccaaactcactcaggacttgagctctgagggccagtgcatttgcaggaagagaccagcaaggaatgttcgaaggttgtacccacaggatggagcccagcaggtcagaacagagggccacttcctgcatttaaattcagaaactcattgtcagggccagtttcatggcctttaactagggcatgtgctcagtgacacccttgcctcttgaagggctctgcatttagaattgaatgctctgtggttagtgtcttgaaattcttaatcattctatctttaaatttgtgttttttaagtgaagtcgagtgggccagtggagcgtatgctgagggctggggcccttctgcagtcctgcctcctgctgcctctgcctccgcctcctgtgagtgggttttcctggctccctcctgcctcctgattcccaggcctctgccccgcctctcctggccctgcccagtggctattgctgtcttcccctcatgcccagtggaggcctgaccacaggcatgaggagggctggggttggggtcaggcaccccagagtgttttggggtggagtatgctcagggtcggcagtgccagtgccacagggtgggtatctttgtggggatgggtctgttgcccatccccaatccaggtgcctagtgcatggcagagtggaggctgaacacccttgggggtggcctgtccactgcaggtggggtagcaggctgtcggaagaggagctgcctggctggacttccttgcccaggttggtgtctgtatgtagaaaggaaggctccataggagagctggggaggctgagcccaggagtcatctccctattggtgcccattttcagtacaccctcagcagagcagcacggtcctagtgactggtgggagagggacctggctgctggtgggcatgtatggagcaacttgggggcccctgggtgtctgtgagggtctgttctcaccccttgagtatccatgtgcccaaggggacacaccagctaaatatcaactaaaaaacatggtgcaggggctagccctaggcccgcacagagatgtgcagcccttcacatccatttgtgtggccattgagccccgcagagtcctccttccatcacagtggagaagctcagagctgcagggaagcggggtggcctccaggctcctcactgccttggggacagccctcctgagcacagtgcccagaatcaaacacagtccagggacatctctctgcatcccagattcacaccaccctgagcacagcctcagggcccctgcttctggggtggctcacccactctgctcaggaccagctagagaatttttggggactcaaggcaaaaataaacatgtcctgtatttaaaaaaaggaaaaaaagtgccattaaagggattaagtataaagttttttttcttttttctgctgtctcttgacctgtcagtgagtagttctcagaccagcagcaccagtattgtccagagttcattagaaatgcagattccttgactcactccaggcctctggagccagggaagggccagcagcctgggggattctgatgcaccaggaaatttgagaagcacagctgtaaagcgatgattattagattttttgtttgttttaaagcaacacaactaaaaaattaaaatctcattggaagcttgtttgtctatgacagataaaagaagaactgaaaaaaaaagagagaggctgggcgtggtggctcatgtctgtaatcccagcactttgagaggccaaggtgggccgattgcctgaggtcaggagttcgagaccagtctggccaacatggtgaaaccccgtctctactaaaaatacaaagaaattagccggacatggtggtgtgcacctgtaatcccagctacttgggaggctgaggcagggaattgcttgaaccagggaggtggaggttgcagtgagccaagatcgtgccactgcactccggcctgggtgacagaacaagactccgtcaaaaaaaaaaaagagaaaggactgggtggggtcaggggagaaactgtcctgccgtctgcatatcgtacttcacatgatgattacagctgtcttgccaagtaggcagtttcccttctacgatcagatgatgaaaatgaagcccatgggatttaagttattggtccaggttcttttattgagcaaatggcagagctcaaatgtgaatctagctctgtcttactccaagtctgaggctcccaccccctccccatccctgccgttctttctttgttcatccttccttctttctctttctccccttgcttctttcatttttgcctgtagagcacctgttctatgctggtgttctcatctaggcctgtgctgtccaatacggtgccaccacacatgtgggtcctgagcatgtgaatgaagcaggtgtgcctgagcaatggaattgtcaatttaatttaatttacattagtttaaaaactgacattcagttccattgctgaaaaacatttaagtatgtttggaataacttgggtatgtgactctacttttcaatcatacattttatgaaatctaaatgccgatcaaagatggctatagttaattaatatattacataatttcaaataggaggacagtgaatgctcgcaacacaaataaatggtaaatgcttgagatggtggatatgctaatcaccctaatctgatcactgtacaatatatgtatcaaaacatcactatgtaccccatgaatatgtacaattattatgtgtcaatttaaaaaattaaaaaattagaataagtaaatatatatcaagtacttccagtgaaaatttagtgtctgcatggaaatgtgctttaagtgtaaataccaatttagacttggaagcaaaaaagaatgtggaatatttcactaatgtttattttgattacatattgaaatgatagtattttggagccagtagtttaaataaaaatacattattaagaacaatttcactagctttctttccttttagttttaaaaaaattttaaatttttagtccttgtgagtgtgtagtaggtgtatatatttatgcagatattttcacatgtgtactcactagaaaatttacaaccacaaacatggcttgcattacatctctatagaagagcgctgctctaggacacgattttggccaaaggaatgatcctgctcaaggggactctttccagggagcctgcaggagtttcccacacctggtcctgtgctgagctgagagaagtgaggctaagacaggagaaccccactgcaaagccaggaagtgtaagagccactcccatctcaggggtggggatcactggcaaacttctcatctaatttcatttctgtcattacccatcatctggcgctctgcagacaacctcagcaggggctgcacgaggtcaggccaagactcaggctggctggtaccaggtgccgagataggccggtatcagcatcctccccactcaggcggcggctaatgtgatcagggatgctctgggcatgtcagacacacagtatctgtctcctctgcggagtaatctgtgcacactggctctccttcaaggtcaggcctccctttaagacagcaggcagcagtctcctatctgctccaagggcaggctggataaggccaggcagctacaagctccatgcctgagggcgacttcaatgaccttgtgtagccataagacgggcaggaactggctccctctggacaaacttggctatagaatgccagctggtgccattctactcgttcaagcagacacgtcggaggtcactgggccagccctctcgtcttacacagggggaaactgagattcagagaagggaagaaatctaatctggttgcccttgagagctagggtctgagctgagtctggaagccacttaaacaggcccccaaggcagagatgttgttagtgatcaggactccctggcttgatcctggagaacttgacacataaacttgtaaatgcacgaaagactcagggctctgctttaagcagcctggcttctgcgctgcctcccacaggggtccccgctactcctgtggcagtgtggtcttttctgtcgacattgccagggtaggggtgggggcacagaatagacattggtggagatgagcatcagacattacagttcttgtaagcccctcagttggtctaccctgagtgatctttctaacacatagtttttgttttatttttaaggattcaaatgtactttactttttccataatgccatattttaatgggcacatggagcttttacttggcatcaattatgatttgtgttttaaacaattcagtatgacaccagctgggatgattactgatctctccattccgttaggggtgaccctggcaacagggcacagattccatccaattccaattggtgttgcaacataggtccatacgggcagtagagaaagaggctccgctagctaacatggcattaccatacctgtcatgaaaatcatgtgtacatttctggtggctctgcctttccattgtttgctgaatgctttgaactctgaggttacttactgtgccgttggccaagggaaatcctgaagctaaagataaaagtgtctcagtcagggacacctctatcagagcactcatcacacagcattgtgatgggattgggttgctgttattaatcataacgattaatgattagagagcatgcagggaggaggggagcttatctagaccaggtacctactatgagccaggatctgggttctcagtgaatcctcaccacaacccaaggtgcttggcaatattctcacccccagtttatgggacattgaggcacggagccctctgtgacttgtcaaaacccacacagtccctgagtagcatggctatgctcacatccagctctccctgactctggcctggagagatgggtggtctggaacagcactgactagatgctgtgaggcccttgatgtctgttgagagtgtgtggaaaatgggcacaaacaggaagatggctcccaggcttgcctccccagctcttcctcggaagcttcctttctacatgcagacaccagcttgcctaggcaacatctgcatccgcgtgtggtgtgtctggcgacaatcaaccccatggccctgattcccatgggacacaatgctagctttgctactaccatggtctctgaagactggttggagctgaaaacccaagacctcaaagccatccctgtccaggcctcctattgcctgcaggattcccatctggtgtttggggagttgggggggaggccccaaggagcccagtgggagggaaggagcatggacctctgtgggagagcagagagcttgccaggcctctgaatggtacagctggcccccgagtctcctgaccctgatcttgagaaatatggggctcccagcccaaagcagacaggtgctccaggatggggactagacccaggcctcagagcagctgtggtacccttcacctccttctgcaccagaaaacagagcactctcctcctcctccttttcctcagatccagggtggccattcacgtcttcctcgggctaatcctcagcactgcacactcaggtccttccccacaagtaggaattgctcctgagtgtggggggccatcggctcggtgcaatgttgttgaaaaggcatcccgtcctggccccttgtctggcacttggaaagggcaaggccaatgatgtgacactcagccctgcagaaatacagtcatggaccatctggagcagtgaacatttgacagagactggctgtttgtcttctactctcccctctggaaggcacccaagttcctttggagtctccttgcccccactaggcgaagtcttgggagggctggtccagatgccagagtggataggcccttcctcaccaccccagtgtagtcaggggtaggcatgtagcttaagcacagatactgagactttgggctttcggcaagtgagccatgccgggattgcagagccaggcgagattcaaccttcccagcacagagtaccacccgctcgcccctcccagctcctggccccgtgacagcccagccgcttgccccttccacaagtgtcactcccatcacatcctaccccctggtttctggtgaatttcccctttgctagagttagccagagctggcttctgcaacctgctccaaccaggactcttaatctccactcccccggccccaccccatttacggttactcactagaaagacttatggttctggtctcaagcctgcagccaacccacttggttccctttgatagcaccaacccacttggttcccttcaatagcattgtgctaattccagaagacggattttagcaatgagttacaaagcttaacggatgacctaattcatctcaccaaacatggccgttttttggggacaggcctgctctgggatcttagcaactctttttgcccagagtgccaaagcaggcctctccactccccacccgctccttgtggatttaaagggaggcctaaacttggcctggggctggatgcccacatcagcaaaaagcccaggtctgagaggcccccaggatcaagtctgcaaggagcagacagctttcaaagggctgggaggggcagggtttgccaggcagctgccctggcaagacagaagtaccaggtgggcaggacctgggggtccttgagtctcagtccctttgtggggcctggctccttcatgcctgccccgggggagctagcctcagcaggctgaggaagagcagggctctggggttagagctggctcaagctgcagttccaccgctcaccggccctcggatcccagcaagttacttagcttgtcagagtcccaggggccttgcctgttagatgggttagtagaggttagtcccaggagtgtggtgaggataaacgtggtgtgctcagcttcattccttagaaggaactcagtgaatgtttagcccactagcactcatacacaccttggtctacaacctcaggcactcaacaaatatgatatttgttagaaagaatcatgttaattctatctccaagccctatgttcccaggctggaagggagctgagtcccagctactattgagatggagggaaggggtcctctttgctgtggtcaggcttacatggggcctggcaatgggatgggctgttcttggtccctcctggtcacctgatgtctttacctgcagtcacttggggctggaagctaggtagctctcctgcctttcttgaccatggtgtgtctgtctgaggcgggaccctggtgtctggagcctgctttcctggtggcaccatgcctatcaccttcctggggcattgctgggggcagggtgaccagtctaggggaacgcctctttcccgaccctgtccacatcaattatctggggtgggagagcaggagatttctgctttctgctgcagagacctcaccttcccctgaggcaagtggcctagggattaaaaagggccaggagatcaaagcacaaaccagcatcttatacattatacggtcctcctcctcttggaataataattattagaattaaaacattggttatagctttgcctgcccccaattaactcaaacctcctctcactcagtccgcttgtgaggcccatctcattcacccttccaggattctaagtcccccactatctctacaccaggggcagcctctccaccttggaccctgagcccactcagcagtgttttttgcaagccctccagatgaggcggaggctcactaaagcttgagaaccactgcccgacaccattctcctgccacagaggacaacttttcattctggcagaaagcttaacctcctgttgcttccaatccttacattaaattcagttacctatgtgctgagcgccttggaactaaggtgtgaaggagacacacagaccccgtgcccactgtgcttgcccattgctgcttctgcccagctgctctccctgattcttcacctggctgactctcacttaaccttcaaagagcagggtcgttgtcactttatcctggaagtcccatgcactccctgcgtgcattagggtcccctcctccaggctcacacaattgcctttttactctcctcctagcctttctcatcctgtgagtcaatgtctgccttcctgcctgcttcctgaacttgttaattctgtgagggtaggaaggtgtctttcttactccaaggtaacagatcattatacagaatggcaggactactgactgttcaccaaaccagccttgccttcctcctggaaagaggtggactccatttcccagactctcttgctccgaggtgtagccatgcaactgcattctggccaatgggctgtgacgggatgatggggccacttccaggcctggaccaacacatctcccaggcatgatggcctcctagcatggaaacaactaggatacttttgcaagccacaggtttcagatggcgaaaccatgaaataggaagatgctgggagatcaactgcctgccaatcacaagtgttcatttttgactttatatgaaagacaaatacattcttgtgtcaagatcctgagatttgggggttattccagcagttcacttaccctaatacaaaaaagctaagctcactggagaataaacatgaaatggttttactttcccaataactatgcctatcacttcctaccttccctttgagtcgttgctcacttggtgattttcccagggtccagagtgtgtgccactcttagttattctaacagtctcattaaggatctctccaatccttaattctgttccctcacatctggttcaaagctctttttgtgctgctcccccagcactgtggccctcacggactggggtgtgctggcatagataggggttgcttctcctagactcttccctgaactgcaccctgggcactggggtgggaaggaggcagaggggaaatgtagacctttctttgcttgccaggcaaggttgcagttccctccctggtggacggtgttgtgaactggggcaggggcaccctcccaaccagctcctctgggcactggggatctgttgtgcgttctgacctcaaatctcagctgacttcctgcaggtggcatcttgcctgtctgccctgcactatgagaattctagaaagtctgagggcccatgtcatcctcttttctccatcagtgcccaggcctgtggtcccacagaggcttcacattctgctcctcttgagaactggatgcttacggcaggaggtgtgcctggcagaaccccatttgccatcagtcctcagtcagattttccttgcctgggtaaccatgaaaagcaaatcttgtgtgtaagcaactgtccaagcaagacacaaatgccagtcaccctttctctcagcctcccttaaactttataagtggttttcctgcgtgtccccgcagcttcagggaggagaccgtcacctctgcccaaagcaattgctcccacctctcagtacgctttatatactgaccatgtcgggaaagcagtggcaggccacagccacaagaggacagaagtcccactggcactaaagcccccttataagagtgttttctctgtgtcttgctcagtggctggatgtgcaggttctcaggtgcttttggaaccagaggtgtatgctgtatcaagttccaagacctcccagcccagatgggaacaatgctagaatctgtaggaggccccatatggccagatgtctgtgttggagggcaattttagtgtgtggctttggaagccagatggcttggcctcaagctccactcctatctagctgtgctggctgaaaggctgggggtgggcaacagggcctgcactttctggcccagaactggcagatctctccactagatggcactcacagtataatgtttcctcatttttaattctactttgaaaacattgtcattttttataccgttgaattgcacaaatagaactatggcttaaaatttacgtagttaattctaggcatgaccttccttggaattctgtcacatttccaagagttgtcaagtttttccccctcttgggggtgctggttggagagtgagggacccattgtggtgtgaccagtaccacaggccagcacaggcatagcctggaagtgatccggggtttgtcctccttcctcatatcctgccctgatttcctggcctaggcccagaccccaggcggggctgttaggctccttcctgcgcctgttagttcactgctcacagagcctgccacctggcaccctcggaactgtaggagaagccccttgtccccccagatgcacttgccacccttcacccacccagcctggatttcctcttggtctttgcacatttaccccgggggctgtgcttggtgcacactggcatggcccacttggtgatacttcctgctcctgcccccaggtaactgtgctcagcctagtgaggataagtccttattgtgccttgagctcaggaagaaaatgtccccagactccctaatggcagagactgacccctgctcatctcagggccctgcaaggctggctcaaagctgaggtcacacgagaggtttgctgagttggatgtgaatgggtttcttggccttcctgtgactgcacgttgctgtggtttaaggtgggttcatccaatcttcttattcgtttttagccccaacatggcctatagctgaagcctcagtcagcaactgctgtaacaggaagcccacccttctggggtcaggctgacctgggagggtccaggctcctgtacctgccagctgtttggcctcaggagattcaccttacccctctggcctgacatcttcatgggctgtgaaggatggggagctttgccagctgcagccagaaccaagcatgagcttcgagtgcagcctcccaggtcccatctgagcaggctgataggaagcatcctaaatccggagcccccagtgggaggggagcagaggggaccactcttgggccccgggcagcactggcattgtgctctgctctgcagatagctgcgccgcactctgcaaaggctgactggaccgctcaccgcccaccacccgtcccgctctccctgaactgctcagcagctgcacaaaggctggagggcagagatgggcagctctggggagcagctcgcaggatctgcaggaacctgatgcgcaggcaggctactgctgctgtgcttgagacaaaggagttcaggaactttccttcccataacaaagtccttaggcccaggtggggaaaatgctagaatctgtaggggtcctcagatggccagatgcctgtgttggagggcaaggtaagtgtgtagcccagaatgtctgggctgaagccccaactccgccactagctgtgtgtctctctggggattctttctaatctccacggtctgtttttgtacaataggtctgacgacattccctatcttagagggatgttgggagtattgtgggaggcagaataatggtcctcaaagatgtccatcttctaatttctggaaccttgtgactatgttaccttatatggcaaagggtcttctcctaccgcccccaacacccccaacaccactggcaagagtcaaataaattcttgtaaatagctctgacccagataatgaacatgcacacaggtgatgtcccttatctggcctatggagcacacactcagtgcctttctgaattgatggctggagtgtgttgacctctaccttctagttctggccttgagtcactacccctgtccccagagccaggggccacacccctcgcctagatggcagggccctgcctacgtcactacttgcatttcttctctatctgaatagctgaggccttttctcctggttccacagtcaacctctgttttctactccataccccaggatccctttgttaccaccttctgatgtgcagttttaccacaaagattcttgcattagatgaaaaggaatacccaagtgaaaccataggtacttgaattttgcacaggcgcgtatagttggaaagggtgtttctgcacttcaacttttgcctgtgcccctgcgaactctggtatggacaggacaaaggtagacatgcccctatcccaggcaggatcttctcatacctgttcccaaagagcctctactcatggcctgagcctggggtgctccctcagtggacagccaatagatcatttctcagggtggctggggtggctttactgctttgcgaccaatcatagatttactggttcactgggccacagtgaggccctagcacactcagttcacagccaccacttcccaggatgtctaaattcagctgacactcttggtacccttcccagactcctcagcactcactgttcccatcacgctgccagtggtctccttcctcaagcatctgcaactgtccctgaaggctgtctctgtctgcagagttttgtccatgtgagggtaggctagaaatgtcggttactccccagaaagcagttctcaaggacttggggggtgggagtgggtgggtagagccccagcctcacttcttggatgagacccctctgaagcctgttctgcactgtgtccagaagcccctgtgggaactgagctaggatgcctgcagcagcaacccactcactagcatgtctgggctggctttcttcccttctctgactcccttcctcatgccagatccttgtctcaggctctgcttctaggggaggccaagctaaagaaaacactggctgacagcagagccggccctgccatgtacactggcttctctgcaaggcacttttacttagtgcattaacaacgacattgtcaaacttggaagtttaaaatattgttttgtaactgctaacgtgacagtagagcagttctttaggaaaattattccccttcctcctgccacatcccaattctctgccttggaatttataatcatccttacctaaatattcttgatctgtgctagtgtttttccctggctttatttccaggtattgtgtttagattttcaccctgagatgttcccattgactaatttctttccttgcatttatcgtgaatttaaaaatcctcgtttcgcattacccaaaagctcattgtccagataattgatgggactttctaatttcttccccatgtgagtatgctgtcgatttggcccacatttccgagtcatgcctggagactgtgctgtggctcctgcgggaggagtgtcacgaaggtctgcccttcccaggccaggggcatggcaacacccccaccagggctgcagagctggaaggtgctcaggcctacctgggctgatctcaaagaggtgcttccctgggtcctcggggccaggaggaagttcagtcacctgtgtcccttgtagagaaataaatccctaaaaaggaggcaaacacaaacacagggagcatgagatgatggggaggggactgctgtcgtcagggtccctggagaggagaggttaggacctggggccctccaggccatggctgggaaggctgggcctcagagaggggcacacacctcctctcctagggagagatgaggcctactcagagtcccaggtggattaaggtggacactgtagtctgcatacatgattggaggagctctgcccacaggcagggggaactctggagcagggagggaggctcccaccactgggagcgcctgatccagtgtgccacctaagcctttctgggccagcagggtttcaggctggacagggtcagggagaagcctggcactctggctcctgaggcaacatgggggaaaggatcaacagatctgtgtgcgtccagtcctgccacgtcttggctgggtgagatttcatttctttaccaatgagataggagtcagttaccatgtacatggtaccccactacagagagtgccaggtgcctggggtgcatgtgtatgcatgacagagggcggctccacctgctctctagtgctgaggtctggcagctgggctgaaaggtgcagaaaaaaagcatgaggtatagggacggggaggctggctttgagtcccagccttgcacttccaggctgtgtgacctcaggtaacccgctcaatgtctctgaacctcagtttccacatctgcacaatgggacatgtctcaggagggtcgagatgccagattcccatgtggtaagtcctactcaagagaatgaggtgttataaccgctgtgattgacccttccccaacccccaggctaggcagggcctcctttatcctccttctgtatgtcagtgactatgagctgtgctgaggcctttatttcattcatgcttggttttgctcaactcagacttggtatggcttcactacatatttttggtcctctcaatgggaaacgcattttgaactccatccctgcaaccaactacctgggttcaaatcctggctcagctacaggaacattgttcaacctgtctgtgccccagtttccttgtctgtgaaacaggaataataaagtactttgtagggatatttggagcatcaaatgaattagtacttggaagttcttagtacttagtactggtacacagtgagaactgtgtaagtgtttgctaaataaatgcctgctattattgtatataagggctccacacctagtggggcaccgcatccctgtgtctgcatttacccaggtgaggggcaaagtcacctgctgtatccaggtcgcctcctgcctctacccccatgtgtactcacagagtacacacccccaatattttccaggcaaatcctggctttcacagggtgatgggagcctcccatgtgctgctggaatcctgcgctccaaggacacatggaagtgactcttctcatttaagcaacgttaatgtggaaaggcagaacatcgtccttacccgcagatgcttgctttagaggaattacagcaataaaccagagaaccagctggtaatctttgtaactgaattgatggttactttcttgctagagaacttggagctactggaaatacattaggatagcagccccaggatggagaaatgtgctcattagagggtgtgggtgagatccatcactggctaacgggatgcatcttgggcgtttgctgtttcagtaacagagtccctgtgtcattctaggtactttgctgttttttttcctgtgtcccaaaatctgtcatccgtacaaggagagtaacaatattgacattgacattgctttctactatagctaaatggaaaagcagtaatagcttctgtttataaagactgtactatattcctggctctttgcctaaattactggatttaatgtagagaccccagaggggtagacactaccattcctgtcttcccagacaagcagacagaggtcaggaaggtgatgcaaccagccctgtgcccaccgcccacaagggtgtgctggggacgtcagctcaggtgtgcccaatgctggagccccaggctttactctttgcttccctatctttatcatggcagccaccaactgactttgtttgcaagaagccaccgtggagagccaggctgtgactgtgggatctgctgctcacttctcaggggaatcccagtgtgccccccaccactgcaggggccctagcactggccctcggctgcccagattcctctgcctcccacaggtcaagaatgtggctctgggactgggtgggggttgggggcctggggagcagagggagtctgctctctggtccctggtatgacatttgctaagactgtgatgaaaagatgtgaatggagtcagaacatagcattcagctgagacactcagggtaggtctcaactttgaacgtgccttggagtcaccccagggcttgttaaaacacagagagtctggtgttttggtggtgtttaacaatggggtctctgaaaactataaagtacctggatttggagtgtttgctaacttcagtgatataaatgccctccccctccatggcccattttatgacatcattgcatgtggagctgagaagagatgcaccatagtgtttgcaccacatggatgcaatggatgtcagtaacctccagagcttaagacatagtacgtgaagtcatagtacattaagttaggaaatgatatattttgaatactttttaacctttgtttttactataacttatttatcagtagatttttgcgatttaatgttttttttttgtttttttgttttgttttgttttgttttgcttttttgggtcttgctctgtggcccaggctggagagcagtgttgcgatcatggcttactgcagcctctacctaccgggctccagtgagcctcccacctcgacctctatttgggaccataggtgtatgccaccatgcctagctaatttttgctattttttaattttcagtagaaacggggtttccctatcttccccatgctggtctcgatttcctgggctcaagcaatcttcttgcctcggcctcccaaagtgttggggttacaggtgtgagtcacaccacccagcctgattcaatttctaataatgtaagtgttcaatcagaatagtgctggaccccacccttgagtttctaaccctataggtctggggaaagtaggaccatttgcatttctaaccatttttctgatgctgagagccctggggaatacactttgagaaccactagtctagggacactaaaggaaggtggccagaggatgacaccttttacatgagctcactcagcaccttggtttccttacctagaaaatgaggacaataatagtatctgcttcatgaggctgtcgtgaggattaaatgatttgatatctggccccatggcctttgagagcctgtgttttgccaagattctgtgctttagacgcatgcaggtcacaagaaccagtacctgtttctggcacctcagacagtgccctcaactatgagggtcctgggaattctttgaggagcgcaaagtgagtgtcagcactttgccagctggccttcctactatagtgccaggtcagggcttaagtgtttgtatctcagaaggaaccaggcacacagtttgcacctagaacggcagtttgcagacgggcacctaggtacagaaagagtgtgcaaactccaggcacatgatagatttccacaaatgttgggccctttcccccttccccatgtgtccgagctcatgttaatttgctctgttagggaattgctcagcctatgtatctaagttcctcctgagaggctgcagctgacttaatgcatctctagcgccatacaaatgcagtccattggtgtaagtagctaatggacaaaggatgtgccattttgtctgcatctaggagggctcagtatttgcaagttttagacattgcaaaattgctttcaaaaagtctttatcaaattatgtttcatcaaaagtgtatgagaatgcccatttctgtatgctgttcccattgcatggtcattaagtgctgattgtccttttaaatggagaatcttatgacatatttattgaccatttgtatttcttctattaattccttgttaacatcccttatccacttttctattgggttgtcttttattttaacaatatattttatttaacatatttatttatattggataacccaatatgtcaaaaaatcagcatttcaacaagtaatcaatataaaattattagtgaaatagtttacatcttttatagtaaatctttggaatctacttatagcatatcagatttacattgcaagtttttatcaaatatatgtgatctgtatttcgatcttatcaaatttgaagtagattcatgtacccaaattgtttcagatatactgtagtaggtagaataatggctccccaaaagatatgcctgtcctaatccctggaacatgtgaatatgttatgctacatgacaaacatttaattaaggttgcagatagaattaagtttgctaaccatctgatcttaaatctagtagtattagaactccaacttaattattctatttcaaaattgtctggctattctaggccctttaaatttctatatgaattttagaatcagctagtcaatttctattaacagaaaaatgcctactgggattgtgatcgggattgcatagatcaatttggggagaattgacatcctaacaataataagtcttctgaccaatgaacacagtataactcctcatttatttagagctttcattttccccaacaataataactcattttttacttcagtagatttttgcaggcttcatcagatttttgacataaacaattatgttgggtatggatacagttttacttcttcctttccaatgtgaacaactttcatttctttttcttgccttattacaccaggcaggactccatgaaagtgttttatggaagtggtgagaataaatatcattatctttatcctgatcatagggaaacagcttttagtctttcaccataaagtatgatattagctttcagttttccatagatggcttttcacaggtttaaagaagctcctttgtatgcctggtttgttgagaatttttatcaggaagcaatattgaatgctgtcagatgctttttctgaatccatgagatgattattttttctctttcttcatttattaatatgatgaattacattaataattttcaaacattaaatcaaccttggacttttgggataaaccccactttgtcattatgtattttcttttttatgtattgttagattcaatatgctaaaatttggttgaaaattttttcaactaagttcacaaagaatattgatctatagtgtctttgtcttgtaatgtctttggctagatttatataggggtaatgctaacctcataaaatacattggaaagtatgctcattctgaaatagaataatcaagttggagttctaatactacttgatttcaagacattgtaaagctacagtaaccaaaacaatgagatattagcattaaaatagacagattaatgaaacagaatagaaagatcagaatagacccacatatacctccatatctatctatctgtctccatatatggataattgattttgacaaaggtgtaaaggcaattcattggagaagatattgtttcaacaaatgatggttgagcaactgcatatttgtgtgcaaaaaaatgaatctcaattcatacctcacaccatatataaaaatatactcaaaatgaatgatatacctaaacacaaaatctgagactataaaacttctagtagaaaacctttatgactttggattagacaaagagttcttggatacaacatcagaagcttgactcaaaaaagaactaattgataaatatgactcatttaaattaaaaaaactgcttttcaaacacattaagagagtgaaaagacaaattacatactaggagaaatatttgaatatcatgtatctgataaaggacttgtacccaaaatatataaaataccatcaaaattctataataaggtaacaatccaatttaaataaagaggcaaaagatttaaacagataattactatagaagatataggattggaagataagctcatgagatgatcttcaacatcattagtagttaggaaaatgcaaattaaacccataattggataccactacatatctattagataaagtaaaaagactgaccagactaagtgttggtgtgggtgcagaggaccgagaattcttatacactgttggtggtaatgttaaacgacaatcactttggaaaacagttaagcagactcttaaaagagttaaacatactgcccggagcagtggctcacgcctgtaatcccagcactttggggggccgaggtgggcagatcacgaggtcagaagttcgagaccagcttgaccaatatggtgaaaccctgtctctattaaaaaatacaaaaatttgcggggtgtgttggcacgtgcctgtagtcccagctactcaggaggctgaggcagaagaatctctggaacccgggaggcagaggttgcagtgagctgagatcgagccactgcactccagcctgggcaacagagcaagactccatctcaaaaaaaaaaaagaaaaaagagttaaatacacacctgggatacgacccagccattccgctcctacatatacccaagagaaatggaagcatatttccctacagagatttgtatgcaaatcattgcagttttatttctaatatccaaaaatttgctataatgcaaatggccttcaccaggtaaatggataagcaaattgaggtacctgcatacagtgcaatactacccagcaatatgaatgaatgaactcttaatgcacgctgcaacatggatgcttctctaaataattatgccatgggaaagaagacagacaacaagccagagtacatactgtgtgattccatttctataaaagtgtagaaaatgagaactaagcggatcagcctggggtcaggggtcaggaggggcaaagggagtgggaggagggattacaacaggatacaaggaagcttttggcagtgatggatatgtttgctgccttgattgtggtgatagtgtcacagatgcacatctatattaagacttaccaaactgtgcccatgaaatatgtgcagttcattgtatgtcaattatacctcaataaagctgttaagaaaaactgaatttgattcagttatcaaaaaacttttagaaatatgtatttgtttcctaacagattactaaaaatgtagcggctcaaaacaacaaaaatttattttcttacagttctggaggtcagaattctgcaatgggccttactgggctatagtcaatagctggcacgactgttccttctggagctctagggcaggatctgtttctcacttttccagcttttaaagtcttcctgcacccttccaccatcttcgaagccagcagcctcacatcttcaaatcactccgactctgacctctttgtctgcctccctttccactataaagaactcttatgattatattagatccacttggataatccaggataattttttttttttttttttttttttgagacgtattcttgctctgtgccccaggctggagtgcagtggcgcaatcttggctcactacaagctccgcctcctgggttcatgccattcgcctgcctcagcctccccagtagctgggactacaggcgcccaccaccacgcctggctaattttttgtatttttagtggagatggggtttcaccgtgttagccaggatggtctcgatctgacctcgtgatccgcccgtctcggcctcccaaagtgctgggattacaggcgtgagccaccgcacctggccaatccagcataatttctttaaggtcagatggttagcaaccttaattctatctgccaccttaattaaatgcttgccatcgtaacataacatattcacatgttccagggattaggacaggcatatctttcggggagccattattctaccttatactacagtagactacagtatatctgaaacaagttgggtatgtgaatctacttcaaatgtagatttgataagatctaaatacagatcacatatatttgataaaaacttgcaatgtaaatctgatatgctataagtggattccaaagatttgctataaaagatgtaaactatttcattaataattttatattgattacttgttgaaaggctgatttttggacatattgggtaatccaatataaataaataaaatatgttgttaaaataaaagacaacccaatagaaaaatgggtaaagggtgttaacaaggaattaatagaagaaatacaaatggtcaataaatttgtcataagattctcaatttaaaaggacggtcagtacttaatgaccatgcaacaggaagagcatacagaaatgggcattctcatacacttttgatacataatttgataaagactttctgaaagcaattttgcaatgtctaaaacaactttaaaataaaatgtcctgtaaccttgtattgaattttaagaatttgttctaaggaaaaacaaatgcacaaaaatggatgcataacaatcctcaatgtaacattttttactacacaaaatgagaaatgacttgttcatctgtcaacagaggaacggttaaatcatttctggtaaggccataccagaatgaggtacatacaaaaggtttctaagatgaattgctaagaaataagaacaccagaaaaataattttaatacaattccatcccagtgtctgttactgtcctctccccagagcccacaagttacatgttaatgtatagaaatagcacagaaaacttacactctgggagggagtggtgggaatggtgaaggagctttcatgttttgccctataatgtttgcatcaacgtaaaatttaaacaacgttaaagttgaaatggaaagcagtcagctaattcatgcagcactgcccatgccctactcacgggctgctgccatctgactaccatcatactctccgacctcatgtgctggggccaggccagcctgcacagtgtttctgcagcccagaatgcccatccatcattttcaggaaacaaagagtgatttccctctctcttctgcaagcatttagggtgacagtcccctcaagcttcctcagactgaaataaagtggcaagtactttccaggtcctctgatcagggtctgcacacatccctgcctgcaggaagcccctgcccacatcaggagactgccatagctcattttgcaaagaatgatccgtcttgggaacagctcccagaacaccggatggtctggaagcctcagctaagtccaggggaataaaggagattaacaacagcaacagcgacaatgatttctactgacatgtctctagtcagatgtctcacacccagaactcacccaaatcgtaaaaagataagcacccattacataataaatccgagatcctgtaagactgtcatggaaacctcacaggttttagccccagacagatctggttttaatcctgactactgcttagtgatagtaaactttgggacaagtttagcctcagtttctctctctgttaaatggggtagtggcatctccctcacagatctctgagaattaaacgggatcaagtgagcagaaggtgtggaatggagctgggctgtagcaggtacccaggatggcagcatcctaagaaagggcagtgctgcagaagttttgtgtgagctcatgactgggggtcagggtcagacaggtcctccaccaacccggctgaacctccgtttcctcctctgcaatgtggaggtgttttgaggatttccccaggtttagtgcccagtaagagtaagtgctattgctgtgatcatgcattattatagggccaaggagtagactctgtgcatgaacattttataggagtgggaatagatagaaacacttagaattattatagggtttgtaattactgtgacattgccgcttaggtagaacacagacaggtgtgttccagcctgttccaccaggctgaggcctggtttctttatgtgtaaaaatgaagatatttgtcccagatttgtcactgggccatctgagatagagctgtatatacactaggggcctatataaatatgaattatcataattatgacttcaaaactcattttggtcactgtatcatttgtttggtctgtttgtagaaacaatctcccctcccctaataataccattgcttgtgccatgaaatgaggtgtgaaacagacttcagtagtcctagcatggtgaaggcagggccctgcttcctagtgtgtgatgacagtccatggggacctcctgcagggcccgggatgtctgtaatcctcctattggccagcctttggagtttgtgacagtttgaggtctttgcagtctgaattcagctcttttcaacatgatcaaagactggctctctgggaagtcttcatttttcaccttgtctaggagactgcctgaagaaacaacttctgcaattctttttaccaagtctcctgataaaatcctccacaggcagcatcttggaaaatggcaggcatgttttagaaagcaatcgctcagggttccctatctctgttaactctgattggggcctcagatcaatcttaaaaaccgttatccacctgacacccaaccaggaactgaatgtctctgagttgtacataaataatacagatcagaatgaagttcagtgccaaggagggaagcatcctccttgcttccttatcacacaagcctgtaaccatgccccatgactgtccagaatacagatttaaaaaggcattgtgaaaattggagataattgagttcttggtaaaggaacgttccctccctaaggagttgagatacatcatttgtccagcttctttccttgctgatgactttctcttgaagcttcttccaacagattccgcagtaacgctgccacctgtgaacctgtgaactccaaatgctcttgttatgatccacaggtctgcagtcagcagatcggacctgggaacgccctgcttcttcactgtgtcatgaggctatccatggtcctcttagaaaatctttagcacatgtggtgtgccacagggacagtgtgttgaggtcagcaccatgttctgcagagagcaggggctttgaactcagaacaccggctccctgcaccctccctatccctcccaactggccacagcccctaaagctcttactttcagtgttgcacagctcaggccctgagcctgtggaagtccagctgggagtcatgaatgagcccagggcctggggcctgagacctggggtagacttgcagcctaagctggaaaccctggtggagccctcaaggatcttcaggtctcagagctcatggcctcttccaaaccccagggagtgcccttttcagggtgagtgggtcctctttgcaaagttctggttgctctgtggtaagccaggaccttgcactagactccgtgccaaacagggtgcctgtgacttgccctgagtcactcctggggtctaccccttcaggcagcctcatctcactgtattcctgagccctgcagaagaccctgtggttgaggctgcactactggtcctcacccagtggccttaggctcagcctctcttcctctcagtcttgtcattcatgtgaacattctaatgcctgcgaccatgctcatgggaatgagatgccatgccacgttgggaagagtcactagtactagtgccccggccttggtggcagcccagggctgggtgctgagcagtgccacagggaagcagcaggattaatgtggaagtgactagtgaacagaatgcttacccaggggagctcttgaatcccctagtgtttagcttgccctgggagaagggaggagaggccaaggtgcacgtgattttacaacacatttggggcagaccattagtgtcatcaaatctccatgggctgctctctgagtgtcctttgtgcttaggttggggccatggtatggggttctggccagtgggattgggcaggagtgacagcatccacttccaggcctggtcctttaaaaactgccagtgacctccagtcttctctcctatctctccccctgagtcaaccttggtgaccacagagacagatgaggccaacatctggcccaccacagacattactacagtgagaggtaaacttctattatgtttagctgctgggatctcaaggacatttaacattgttcattttactaattagatgttattttgagaaaataagtgttagagaattttgtccttagctgatcacctggccacatgaacaaagaagttataaaatcatagcactaattaaacatcgtatttccatgctggtaaatccatttaactaataatgatgatttccttgctccatggattggatgttgggaaggaaaaagaaaggagaggtcagtctcatctactttgactctggggaccttgggctgctgggagctgtcttactctgatggttagaagcactgagcatggcatgtctaggttctggctcaagctgtgatggccgtgtagtacgcacttcctgcctcactttttggactggagcattggagggagcccagaaaagactgatctagatcactgtccaagaggggttgtggaccccatgcccattcctggctgaatgacatgtcctgggcagcatgagatcctgggagtttgcaaacgaccctgcttcctccttggcttactggaccatatggtaggcctctttgccccctgaagtacctggtgttccatgtagaggggctaagggggaaactcagatgagctgaatccctctggctgcccacggcatttggtggctgcataagacactgcagttgagacaggtatgttcacagggaaccagccctcagagggcacatgcgctgagcctctccagagggagtgaccgcccactttttagtattttctctgatctgggactcaggtggatatgggcattgactgctgcaccattgtgatgctcaccgtctccgctgctcttcagagcctgccggctgggtgtgaaacagcctctcctgttcctccagaactgggagctcttggtaggtgctgcctggcccccacccccaccaggaagagcccttggggacacagggcctctccactgcctgggttggcagcactgaaccaccggcctgctcttccatgccatggtccctgccatgttttccagggttgcacagtgtttccagtcttctctgcccacgaagaacagacccagctactcagactgggagcgctggtgctgtcctgtcttgtcctgagcctaagagcacactcttggaagatttttttctgctcaaaatacacctttgggacatgttgatgctgggtccagggcccctccttggagtgggtggggccctcctttggctgaaaatggtttgattctgtcttatttctgggaggccctgaaactagtgctatgctctggggtatatggtgtctctgtgagagaggctgccatgctgcttagttgagcacaggttagcctgagtaacatggtatagacacttttgcattgacctgccctggctgtgccaggctgatctgctgagccaactgctgccaaggggcactggctgcattttgctgaggaaggcacacctcatccctgtctttagcaaaggccacagtccatttgggaaatgtacccatcgtcctcggcagcccttccaaaccacctccattatgctgatcaactgtaactcagtattccaccaatgcattaaggagctagaatgctccaaacacaatgaaacataagttatgctcttctgaacaatgaataaaatatgtttcccatgctgcttcaatgttacttgattcatttttctgccttgtgattgataaaactcataatttaactatcagttttctacgtattactgtaaattaactgggttgcaatgaaagccaaaggattgctctattataagtgtgagacctttaagtgctgtaaactaatatccatgctgacttaaattagcagatcctgagagaagctcattactaccggtaacactggaagaaacacaaaagtcatttttagaaggtggagatccgtcttgtaggcagtatagctctgggtgcaaaacaattcgggggcaaccaagacattgtcacttgtgatttatttggtcttgaggtgtcatcaggcctcttctaacttgatttccttttcctaggacagtagcagaattttgctgtccatacattagtccccagacattgctgatgctgtcatttcaggggcctgctctcagaaccctgcaggatggtataaaacaaaccttaaaatgtattttgtatgattacttaaatcttgtgtttttctttgacatgcagaaaaaatggttttaactaaatattgtttgaaatttgtttaaaaacacagctgctactgccaatttcaagttagtaaataaatttatatttgacttaaaataacttgcttgaatagagttttcattttgatatgtttaatgtggggaattatggttctaaaatagctgcaaaaatacagcatccctttaaaaaagccacaaagtctcacagttgaatctaaataaatgatacccctctctctttttatgactccaatgagtaattcttcacagaagaagcatttcaagttgtcccccaggacattttaaaaaaggaaatatctgttgttgaatttttcttctgcagcactaatgggagtgtgaagctcagttcctaattaactcaaggtgctctctaacgtgctgcagaagacacttttcaatcatcgctggcttatcctggggcagagagggtctgagggatgcatcagagcctgtcttttatgctcaggtttgtttttttctgagtgtagacagactgactgaaatttgctgtggcaagatctatgggagcagcttgggaggtaatcagttgcttgttcttttgtggacagagacttgcaggtgggaagtaggaaggagggattgaagtcagactcttcagggcttctcaggaggtcaggggcaaattcaccaagagcaatgagatccatgagtgaccctatcttcaagggccccatggcatcaaggtctgtatccatcagctctcttgccaccaactgtgtctccccagagaccttcacctggcccaatagtggagccagggttccaaacgctctgcacgaaacggccattgaggactgccaggggtgcccacagtgggacttctgggaaactgccctgctctggccagacctccagagcatgcctgcttctttggcctcgtttttgactcatctagggtggaacttctgaaaactgctaggatttggctgaatgtagttctttttcttccattcctctttgccttataaggtctcggatgaacttttgacttttggagttgagagggctcttggagatcatttctggccaacttgctacccagtggtcagctcttctccaagccacttaatctactaatagtctggcctctacttgtccagcaccagggactggagcccgctaccacccagtagaccactccatcagaatgaagtgtggaatggagtgtagaagacaaatcggggagtctgtccatttgtcttctggtcttgttcatataaggattcagagcttcatatactgccccttagcaagatttcttttctccagatgacttattcagttattcctcctatggacatgagtttggactcctctccatccttgctgccctgttcttgaaaatatagtgccttgaggggaccgtcactctccagaagtgacctggtctgaccatggaaaagcttggtggggcttcccctcccttgttctaatttctatgcatcttaagaaagtcacctaatctctttgtgcctcagtttccttattgggacagtggtgatagtactcattcctaaattgtttcaatcatctactgctgtgtaagaaaactccaaaacttattgcctacaaaatagtgatctgttatttgccatgataccgtggcagggatcagtggatgtttcttctgctctatatagcttggtccagagtcactgacacagttgcatttggcagctgagctgggctataaggtccaggaaggaaggcctcactcattcatctaggctgtgtggtttttctctcattcacgcttcctcatcattctgtggtccattcagacattcttacagaatggtggcggcttttcagagcaaagcagaaacatgcttggtttcttagggatgagatctaaaattaaactctaaggcccccacctgaccaaataaatacactcttggccaaggggaacctagggaaaccttaaaaactgagttcctggctgtgataggaggtcaaacatgccttgctacatccttcttcagtttagacaccacatccgaccagcaataatgttacagtagtgatcacacaactgactttatggcaataagataccaaattataaataagacccaaggccattccaaccaaccaacacttaagtcatacacctgtacacttaaagaataaacaatgttctaactgccacaggtttttctttttctctagcagttaaacaggcactagccctaagaaacaagtgctaaaacaattgtagttcaccgttagaccttgactaactgacccccaacccctggtccacaagtcacaactacagctttgattggacaagagatggatgtcagtaactttctcctgataaaagaccaccaacaataggctggctctgaccagttaacaagaggctgcacacagagggccttcatgtccctgcttcacctattgctgtatagggcctgcctgcaatgcatttaaatgttaagcctctgctccagagtgaatatgagtcacatttaatatggatgttcagtaggcatgagtcaggaccctctttgtgaatattcatagctcctcctgtaaccctacttagctaatctgttcaggacaaattcctgccttaccatccattccctcaaagtgcctgcctttccgggtctaccagaggctatgcttcccaacctgcagatggccagcctgcaggttgcaatgctttacgaaaaataagatctcctttctaaatttataaattgtgtgatttttaagttaacagagaccaaacctggaaatggcatggcatcacttctgtcttattctgtttgtcaaatagtcacaaagacagctcagattcaaggggaagggaaataggctctgcttgttgggagaaggggcaggaataagtggcagccatctttgggattatctaccatgtatcttgcagagttgctgtgggaattaaagcaagttaatacatgcaaaacacttagaacagagcctggttcatcagatatataaaagttagcttttatttagattcaaactgttgatcaaactcacgaagtaaggcagaggcgaggttggagccatgtcgcctgcccctagactccactgtttgattgtgttgaatgatttgctaaaccttcatagggtaaagttccacccaggggagaaggccacaactagggtatttcctacatggtttaccgcatgagtttactctcaccatagtcctataagataggtgtggttattctcaacttacaaggaggaaactgaggctcagagagtgaaatatcttctctagttaccagctagaaccatcctggttactcaagagaaatctgccatttttctctatcacgcaagatcctgtaatatgacatgctaaaatttagacaccaggtattcgtggcagacttaccacccacgagtctggactcctaatcaagaaagggagtgaagaccatctgaagggctggtctcagggagctctgcatgttcaggcaatcattgttttctagatctgcaacttcctttttataattcatattagatgccttcgcatgcttcttgaaggtctttcatttcagaacccattctaagaattgtaatagtcttatctctgagtgtttaggcagcattgacaacactatcaaccacagcaacttccatttgtccaatgcttagtgaagccacagcctcaaaggaccacaccaaaagtaggaacaagagggcttcaatgatcttcccaaatctatagctagtaggtggtataaatgggacttgaagccaggtattctggttccaaatattatggttttttccattatagtatgcaagctttcattctacctttttgagccccacattctctaccagtacagtggaaattgattgtgcctggccttgtggagatgctgtgtgaatgtttattgaacaagtgtttattgagcttctactatgtgtcagacattgttctggatactgagacacagagataaacaagatagacaaaaacctcaccttgttgggcttacagtctgatagggaaggcagtcaataagctctttgccaattctcaggcactttacaaaagcaataaattatttttccattgaggatctaatacaaatatgggtcacactatgcactcattcattccatttatttttctcatttattcattcattcattcaattattcaagtaagcacccaatattactggataccaattatgtgtcaagtaccgctaggtgataggaaaagagaaataataagacagattgaagccccacctgaatgaggtttatgatatagaatggagaacagaaattaaattgaggaagtgttataaataacaacagcaatatcaaaacagtaatgcaataataatagcagtgacatcctcttggctggtttgagtaacaatttacagcttatgaaggatgcacagttagggcttgctaagtcaacttgagctgggtggaggttatgaggtccagaagtgaagggcatctgacacaggggcggtcctgtgagctgtgagcacaagatgagctccgacacctgatggcatcttcatcgtacccccaggtggtgctgagatgagggccatggaagatagagccagccaaaggtgtgaggtttttgtgggcagacattaatggcacggcagggggttgtcctagcagtctcactgaacttgtgtcagctttcaggcgctatctgagagtgagtacctgttagtcttggcctgatgtcagtccttcagtttcctcatttgagaaatggagacaacccaggcatctactccaggtcaaggactcagggaaggagcgtgatatggtttggctctgtgtctccatccaaatctcatgtttaattgtaatccccagtgttggaggtggggcctggcggaaggtatttggatcatgggggcggtttctcttgagtggttagcaccatcttcttggtgctgtcctcaaaatagagtgaattctcacgaaatctggtggtttaaaagtgtgtgtggcacctccctgctctctcttttgctcctgctctggccatgtgacatgactgctccctctttgccttccgccatgattctaagtttcctgaggcatctccagaagctgagcagaggtcagcatcatgcttcctgtacagcatgcagaacaatgagccaattaaacctctttaaaaaaaaattatccagtctcaggtatttctttatagcaatgggagaatggagtaacagagttcatgaaagcaacattttattttttgtttttgtttttgacgtgcaagtttggtaaacaatggggtgggaaatgaagattccctgcaggctgaaatattcctgtgactttcaagttatgggataggatggcctctctttcttcccctgaggtttcctctttcttaaagatttctggtttccgactgtccaatattaatgttccactcctagaagtgcatgtgctttcccatccatcttgactttctccccaccagtctcaagcttttactcaatcacatcaaactttaaatcaatcttctatggctccttattgctgagcttccctcacttattctcctggaaaaaaaataaaacatacaacagaaacctagcctgctctcaaagtgatttttaaattgcctcttctagaacataatgttgcatcagccatggcaggtaggtgggagggggaagtgtggattccaaactccacctgccatgttccctcccctgcttcttccaaggcccccagcccttgttccagcatggtgaggattttcttggcctcagctgatattagaacaccagccccatctaagtggcctttctgcttccagcctggtcctggtcagcccctatctgtgctgctgcaggatgactctcctcttggggctctgatggccaagtataagcaacccacaaccttcactgacccctatcgcagcccacgaagtgaggacctagatcctgggtgtggcagtgaagcccctttacaggagtcctctagtcccacatctgcattttgtgttcctgcctgtaggatgagcatcctatgccctacgtcagagactatgggctccccactgggtgtggactgccagacacatagcatccatggacctcccacacattcctaggttcattctaaacacatcttccaagaacctccaatatgccagggcctcttcagaggccagcgtggggctcagtggccctttctagaagagggagcccctggcctggcctccccattctcctcctggtcatccaaagaacctctagcactgtggccctgctgcattccgttttttggttatagtttttcttttcttgtttaaatttttaaaatactttaaaatatggacttacatgaagatagtctcaacgtgagaaattacaataacacagaaaaaatgcaagctgaccctgttaccaactcactcccctgcctcacatccctgccccatggctctgacttgtcttatttgtatgctcaaaatctcaaaaataaattatttccatcttatttcactttttttttacaatgaaagtttacacttgcacatagtttgaagaatcaagagttctacacggcttatcatgaggcagcaaattcttcccctgccattgcctgaatctgtcaccacgttctatggtctcagatgaggtttcttttctatctttctcctttttttaagatatttatttctaattagtatgcttatgttactcctttttgattttacattttagtcattgtctgtggaattcctagcatgggcagtgagattttgctttctgccccttctccactcacccatccctccccacaccgccacccaccgccacccaaccacacaccttcccaaatctccatggtaattttggttatctcagttagtatttagtgtttatactcccatcctggggagtttatttcaagcatttctctaaagactctttttccttcatttctctcttctctttttctaaaactccttctattcggacattgggttgtctctcttattgtcctcttcttcctagaagtgtcaagttttcatccaacccttctttggagttttttattcatgatatcttatttctgacttctggggatcggttcctcctctgactcttccgtatttagagattctctctgaggatattacagtagttttgtataacagttttcttccccctgcacagtatctgctgcctgcaacttgctttttgttttcttcctctttttgtcttggttcctcaaatgagagtgtttcctcaaatgtctgctgaaccaggcctatcactcccacttgagaatggttctctatggagctgactgggtggcgtcggaggatggggagggcatacacaggagggtccacctccgccattttactggagaacctctggagaaatttactggagaaaattcatcagtttccttcctgggggctactcctgactgctggggcttggaaaccaaatgtggatagagactggggcctaaggaactggtctgcacactgatgttcacccaaccttcctgttctctaagatattccaccaagaaagggccagagtccccattataaagggctcccttttattctcagagaatacatacaactccagtcttacagctgagtcggggcgggcagtcacctcttggcactggattgctcagaaaatctgagatctaactgctcttttttggttttttttttttttttttttttttttttggagacagagtctcgctctgctgcccaggctgaagtgcagtagcgcttatcttgtctcaacctctacctcccaggttcaagcaagtctcctgtctcagcctcccgagtagctgggattacaggcatgtgccagcacacccggctaatttttgtatttttagtagaaacggggtttcaccatgttggctaggctggtctcgaactcctgacctcaaatgatctgcctgccttggcctcccaaagtgctgggactagaggcgtgagccactgcgcctggccctaactgcttttttttaagttaaccttcacccagtgctcctgtcctgagctccttttttgccctcatttccagagatatctagtcctgccaagccccaagtctttgaggggttttgttttgcaaaccagacagcttccatgctctcctttgtgctggtttgggatttagctgtcttggatcagctaaataaatcagcagcctctccctcatctgttttcctgcatccagaatgctttctcccctcatgttctttccatctagttgtgcttgtgcctttaaaaacatcctctagtgctgtatcatgaagttttgtgatgtggaggagccaaatgtgacttttaaatgtcacccttaactggaagtttgaatttgagttttggttttctcattaactacagaagtattatgcagtgtatgtgtgtgtgtgtgtgtgtgtgtgtgtgtctgtgtgtgtgtgtttgatcttcgctctctcatgcctgcacactctcctcaatgtcattttgttattaacttgtcttttttgctttagcattattgacagtgattgggtctctgatttcatttttttgaaaaagtttttttttttaaagagaaacaatgagtgttctttgtttatgtcttcctcaaagctatggcattaggagcataaaagttcacagctgctgtcttttctcagtaggttatctatattaggaattatatctctctgttccccttttttcttagcatcttgaatcctactttatttgatgttactaaatttgctttctttttgctcacatttacttgcttacctttttttttccgttcttttgctttttaatctttttgtttattcctctctcttttttagacccaatctcacactttctattttaagggatagatgaatctaacctattcatgtttattatgagaaacaaaatgtttgtaccttcttttgccatcttatttattagttttttacttgtctttctttcttgttttttatttttttttcctttcccccattttgtcccatttgctcaactgatcacatttaattttttacttttcctttggtcttaggtttcggaagttatactttccatgtctattttgttccatttcaattcaaagccaagaaacccacaacaaataaaggaccgagataactagacttaaagtgagttcccaacagtggaaatagaccaggctgatcaacaaagaatgtggcaggagttttcatgactcaacattccaaacacaagctaaaatcactaaggtttaaaaaacctggaagcctctacttgtgaaactgtgggatctgtctgctggaaaccctcagggacaggtgctgggaaaagctggaggatcaagggtgcacttccaggctctgctgtgacatgcctttgcctggtctttccatttgagcttgtgcaagctgcttcctttttctccgtcttgaactgtcttgtatctatgctttctgtcctctgctgaccctcctgccagcaagatggggagaggggaagagatagggctttggagagagaacaaggaatgtgggctgggagtgattctcctcctgtgttgtgagctctgcgaagcatcaaacatggctggatatccttcttccggacagttacatctgctggtgcagcccgtcctacaggagagtgctgaccgcctgggccccctgtcactgagaacagtgagcagggcatatttttccaggaaccagatattgagaattagtctattacatgccgttcatgcaattaaatagaaatttgtgaggctatgttgccagcagctgtgcaagtttgagatcatactgtataagctgaatgaatcaaaattgaccgacagttgccttgagattgggaacctgggcagtggggtgccatagaagccaggctttgttgggggaaatgggaagaagttttattgtcccaagaggaattgggagtgagtgccagccagacccagaaaggccacaagagctctgggcagatgctggcatctgctgggagatactggcccctctcatgattcaacgtgctccctggcaataaatgccctggttcagtttagattgggcttgagggctgctcttgtgtccaggcttgtgactgtggatgtccatgcctccattttattagttgcttccaccagaggatgtggaggtctggaaaacgtggcaggggagggagaggagtgtctggctcagaaatttcaggagatagaggttccttatggagctagctgatgggtgagggctcccagggccacttcaaggttcactataaggaatacgtggggaagcctgtggcagaggaggctctgtccatgtgtggcctgggtggcctcagggtcatgagcacccgggctctcccagcatcacaaagtcctgttccgaggaggcagtgctgtgggctggtacaggaggagggtgacagtaagggtccaggcagggctctgaaaggctgggagcaactctggcaactccgttcacagtaatcagagtgacagatcaccaacaggtcagccaggaaagccaagacactgttgaagggccaaggctggtctacaaaactgggaggccagaaggaaatgactgtggggaaccagaggtgtggtgcctagcctaggagtgagcctgaggggcagttggtggccaggtgagggcagggctgggtgggcttgttggctcagatttgagtatccagtgtgctaggatttgtatccagttatgtgtatgttatacaatttaacccctagctcatccctgtgatggaggtaatattgtctccattttacaaatgatacaatctaaagtaaaaaaaaaaaaaaaatggactccccattgtaaacaaatgtgaacctgaaacagccagtccttcaagatgagtccccaggggctaactggacctaaatttaaaatcgggccaagtggacattggctgagtagggatcacacatgtactctgccttcccccaaagaccagactcctgtttaattctggaactttcagatctcacctgaaccaaccaatcagagttctcctgaaccaacccatcagaactcactttccagagctcagctgtatcatccctcagaactaaataagtccaaatccttcatttgcataaacagacctgactgggaacctgggctggcacgtttgctataaaaccctcctttatgttctctggaacacaccttcaccttttgcatggaagctgtgtctccccagtttgcaaactgttcactggaataaagtctctttcctccatattccgtttcagaaaacttttgttcacactgcacagctagcatgctaggtctcattcagatctagctgactccagagttcctatctggctcacttaactacttagagttctcctttctcatacaatcaaggaggctggacaacatcagggttttctgaatccaccttcatgatttttgtcatactcacatttcatctgtgctattatttgtgtaaaagttttcctgaagcagtcttacttctaattaatttatttttattgtggtaatgtatgtgtaacacaaagtctactatttgaaccacttttaaatatataggtaagtgccattaagtgcattcacgttgctgtgaaacacttttggttttaacgtcaatatacggtattttagaaaggaaaacttggtatctctatcacaagcgggaactttccatagaggtagctattggaatggacagaacgaagacagaaagttattcatgagcagccagttcctgttgcactgaaagctctaagtaagatgaggcctgttcccttttcacccctgtgcccccatattttgtttaaaaggaggatccaagtgtttgagaagtgtcaaaggtaggctcacagggttgacacttcatccttgacatgcttagaagaactgaaagaggaaagggacattttctcatgcccagctcccccttcaccccttgcccatcccagagtcccctctctgcccccaagctgtggggatggctgggatgtgaaccaggtcccttcccagcaagattccgtgacctgtgacaccgaacaggggatctgccctctctgacttggacccatgactagaagcagcttttcggacaagtcctttaaggtcccttcctgttttatccccaagagataccctttctctctctgaaacccatcacagggactggattgcccaagtgcttctggcccaggtgtcttggatggcagcacacagagtacctcattatgacgtttgcatgggccgctgtgacgaggctatactgtgatgggcgaggctactagctgctctgagggagtaaacttagtgcaatttggatgaaaggcagatatttaaagcaccttcttaaaatgtgggtcacacagtgctggacacagaaaccctatgcaggatgggtgcaagggcttcagagtgagccaggtttcagtttgaggctagatgtgtctggtgacccattttcctgcaagatacaagtaatgaaatgtgtgcatgtatgtccttcttggaagcatgaaggggccaaaaagaacatggaagacgttgttttcttaagttggacaaggacattctctatcaacattttaaggaaacattttcattgcagaagttgtggacatgttccagtaaaacaggctgtgataccaggaacatgggggataagaatgaaaattactttggaaatcctggcaaaacatcactgtgatggagtcagtggctctgtgccttcctcccttctcctgggcatggtcttccctcttgtggagccctgccacgatgcccacggcacaccggacatgcacttctcacctggggcttgatctcatctttgtccttgtagtagaaaagctgatccccacgcagcacaaaccagcgctgctgccagttcttcatgatgctcctctgcttcttcagccagcccgccttcagcacggggcccagcctgtgagggcacggcatccgcccagggctccggctctgctcccccatcactaggcttttggagcgggctgaaagccaaggacacacagagtgagcatgaaggcagcgtgcctgctatcagtcctgcccccatcctggtgtcccagctgcctcgtgactgaggcatgggagcccaggccagcaggatgtgagcagctgggcctacttccccttggcattgaaggggcatgggttggagcatctgtgcagcagcctgcagtgatccccctggggtaggggtacagcctgcccacctggttagtttctgctctgtctctgggatcctaggttcttcattcctccacatttgttcatccatgcatccatgtatccaaccatgcatccatccatgcatccacctgttcatccacggattcatccatccacctgttcatttgttcaacgattcatttattcattcagccattgcttattgatttcttactatgtgcatagaaccgttctagttttccaggggacaaagtagtgaaataaaaaacagataaacatctggatcctcctggagctcacagtctagcagggttcctgttgctcaggtccagaaggaactggccccacccagatctggtttctgcttagcccctctactctggaggcatccgagcccccaaagcctttgtatttgttccctgggaacatcccacagcggggcttcttcttcagctgtttgctgtgccttgttggtggcttcctggcagggcagaggggccagcactcctaccccagagcctctgagtgcccgtgagccctgcaggtccttattctggttgatggtgctgagccacaccccaccgaggttggtgctgcccttcacagggatgactgaattcttgtcccctctgcccctactccttccccttctgtccccctccttcattctcctctgtccccagggaagctcctctcctctctctggccagtgtcaaggccattgccacagtgatcactaggaggggccatcttgaactctggagaaataattctgagttcaaatgtaatcacacctgtaattcttaggccatggatcctaacttgtgattggaaagcacagtgcctgtgacctacaattcttgcactgtatctgtgattctgtgtgtgtgggtgtaagctcttcccactacactagtgactgcagttctctaagcctggcctacttctgcccatgtggtcccactagcctggacttttcttccatccctcttccatccataccctggcattagctgcatggtgagctcctatatatccttcaagagccaactcaaaggacacttcctccatggaggcttccttctgaatctcctccaaatagtcactccctcccctaccaggacaggtggcccatggctggtgattatctgtgtggttgtctttctgccactctggactgaagggtggggactggaggagatgatgtcttacccacttctacatgcgtgtcctcgttactgtggggggcaaggaacagacgtaagtcatggtggtcaaatatcactggatacttagggtcacccttattgttaggtattttttgtatcttaacatgacagtaaatattacatagtactggctgggcgcggtggctcacgcctgtaatcccagcactttgggaggccaaggcgggcggatcacgaggtcaggagattgagaccgtcttggctaacacggcgaaaccctgtctctactaaaaatacaaaaaattagctgggcatggttgcaggagcctgtagtcccagctactcgggaggctgaggcaggagaatggcctgaatccgggaggcggagcttgcagtgagctgagattgcgccactgcactccagcctgggcaacagagcaagactcagtctcaaaaaaaaaaaaaaaattacatagcactcaggcactgtctgaggacacattatagcttggtgtgttgggagaaaagctgagtgttgagagagaagctgaggcagggcttggaacatgtccagggtccagggactaaaacccctcgtggactttgcaatgtgtctagacttgctggctccttgcttctagcactcccattatctcaagtagccatatgtttcaaagaaaatgctaaaccatcacagctgtagcacatttgcttgatacactgcttcctttcaacctccacatcctcaccacctgtttttttgtttgatcaccaataaatggtgtgggctcccagagctccgggccttcacggcctccatactaacattggccccctgatcccactttctctcttaacttgtcttttctcattcctttgactctgctggacttcatcgctcccacagcctggtattgggtccaatcactccaacactgatgttcacaccttcacctcaactgtcatatggcctggggtataatactgaatctatcacttttacacaggcccctgctctggaaggggttgtcccctccagacaggctgctgctcatggacaacagcagcattcacaggaggcctcatctcttctctctggcacccaagcagctgtgatagatctatgggtaccactagccaccctggtgtcagactgtctaggtcctcacccgctccaccttgattctctgttgctgtccctctgctgctggagaggttggggttgaatgctctagccttgccttggctgtgttttggcccagagaggaagtgggttgtttgcatgcttgcccctgaacactgaagctggattggtgattcctcaggacagtgggttttttccagagactaacgggaaggcaaatcagggagctgagtgtggatcacatggcccaggactttcaaggaaaacagccccctctgaagcccaacagcgccctgaaactgggcttgagcttcaccttatctgtgtttcagaatgatcggcactttttttccctcctctctgtggggttggtccctgcacttgttcatgtggatttagagtgtgcttccctcctttatatctatggctggttattatccctgcaaatggacacaccgtacattgcttttagattctcacattgatgggtattggcactctccttaatgtgagttatttaattaaaaagacgttgggacccaactgaagaaatacaggctttggactaaggtttgagtttgcatcactgccagctctgtgaactctctgtgcctcagtttgccagtcagaaaactgggcccatatgagataacaacacctcacccagcagggcaagctggcagaggggagacagcataactgcagagtgcttagacgtacaggtgcctagtaatgggttactatggtgataaggattaggataatggagatggcgcagtggatgtctccatgcagaatttgtttcctaaagctgggctcccagcagtgaggtcacagggcagagaatggaccactctctggcccctggccctttaaatgtcactatacactgccttctagagatggcatttggctgtattacaccaaacaattatgccaatgtgccactttccccatcactaccaacataaaatagtataatttgagcgttcctactccataatttagtaggtataaaatggcacgtagttattgtcttagctgttctgattttgggtgattaatcaactggaacatctttgcacgggcttctaccaattgtatgagacgtctgctcgctccatttgcccatttagctgattgcccacagcaggaggagcactgagtcaaactcagtggcatacaatcctggagtcctggagacccagagctactgggccccctttccctctccataggagccccagaccttccctgcaagtcttcctacagcctggaatttccagacacctgtatttccagacacctgtagcaccctatcccgcatctgtgctgcacagccctggctgctctgcaacctcagcagccccgtgtggaggacacagacttggaagaaaccaccctgcccagataagggtgagccgagcctctgataagacaggtggggttgtgccagaagagacccaaagcatcagaaggggcctttctgctccagggctgctgcctccccttctccatctcaagccagcaaggggttgagcagggctggattcagcagcactcaccagtccctttccagggttggggctgcatcaggccctgggaggtggagctgacaagtgttatcaggacccctgggctcgagaggagtctggcaggggactaaggaggacagggagaggtgtgcccctttgattactgagttttcttatctgggtctcaacttgctcatctctaaaattccttcaatgggttgagaattgctagtcaaattaggtcaccagtgcctgggcttttttttgtttaatcaagtgagattcctaccatgagacttggcagatgttgtttcccctggcagtgaggagtctctggagctgatgggttggcttaggtctccactgtctattcttgaattctcctttatctcttatcagagaatcttcaagggctatggagaacattttgtccttccacagatgtttgcagagtactctttggggtctttagtggggactgaagtcatggaatgttctagagctacatccctgattctgtctcttgtcttctattacaacaaggcctgaagctggttcattaaatgcacttgctcttctttccacatcccccatagcatcctgtgcagggctggtgcacattaggagctcaacaaaaactcggtaactcatcagcacagtccagctcctctgagcactgctgcaccctctgtcccagcggtggacaatgtctgtgaggtgctctctgtccaggcatgcctgccccaagaagggtgagctccctgtgcataggaccatggatgctgagcctggctgagagcaggatcttgcacaatcaatacatggctgactgtgggactggcctgtagtcaatgtggcaagacaaagaaggtgggcacattctgtgccctgatgcccaaggcccaggcatcaggcctcctgagagcttcacgtaaggagggagcaggtatggggggccatgttcactggggcaagggtaggcaggaagctctgggtggtctctacttcagtagatgtaggcatccccgagggttccacctgccccaccctgcaggataggaaaggctggctccagtccctctgacaaggaagcacttcctgcagatgctactgaagctgcaaaaccagcctaggattttccccagctgatcaatcacacacatattaggctgatggagcttcttgaaaggaaaataatcattgctatgatttattaataactgctgttccggtcttcagcacttcctttaatcaatttatttggtcctgttaatatttaaaccaggcctcaagtcaaacagctctggcattctaagtctccagaacagatcagagtttctggagggtccccaggagcaggcccaggcaagctcagggcccagagaggaggaaggtgcccttcaccctccacccttcccaaaggtggctcttccatgcacacgcaggaccatccattcactcatccatttattccaaatctatggagctcctccaggtacagagcccaattgacttgatggtgttccctgtggggtcccgcagtctggcaggggaagtaaatcacaaccaccacggagggatgaaagagcacaggccttgtggggcaggcaaaggctgtggatgctgaccctgaggtgccgacctttctgctatagacctctgctgaggtccctccaccccgtggagggaggccccaggccaggcctcgaaggatactagagtgtgggatgacctcaggggaggtggggctcaggcttgggaggaagaagctagcctggcacttgcaatcttttggctcacatgactgcgtgtgccgaggggccgctgtcacctactcttgctgacaggcacatcttgagagggtggcccacatacctgcctctccttcctcaccccccagtccccaccaactccttgcatttagagattttggcctctcctgatattgctctgaccaaatccaacctgaattggatctcagggtctcatcctccgatgccctgtggtggctcagacactattaatcaccctctgcttctggaagctcttccttccttcccctctgcagagcccaaataccagcgtttttgctcaagtttctttccgcttccccagcctgcttctggcttcaacttcctccatcctcccaaatcctgctgttgcccagggttgtcccagctgtctctatttcattatgaatcccagggcgttatttctgcccggatcttactcaggagcttcagactcatgtgtcaaaccatctgcaggacactccagagaaatgtctcatggttatctgggcctatgtccaaattcaacatgtctctccccaacccacttctcctccccattctcatccagggctccatgaccaagcagacttaacagcttggacttgttcagacaaatccctccccgtcaagtcctacagtcccttagtttccaaatctgaagattctctcagtgcattctgccttcttttcatctcccctttactgaactgatttgtatatagccatcccttgcctgggctacttcctgactcttagctcctgccttccacaagattctccaaaatagatatgcagctactaagggagctacacacagatcttcctacacacagttctaaaaaatcttactcttttcacagaagtagttatggtatttactacacacagaggaaaatccagccccagcctggcaatcgctacccttccacagcacaggattttcctgtgtgtagctccctccacactgcaccccacgggcatgtacaattattatgtgtcaattataaacaaaattttcaaaagcaggtaaaccacgccaagggaagagagttaaggtcgcagtgtcatgggtggaggggtgagggtacacaagggccactttacagagagagggtaggggtgacaggagggggagtacagcaaagaagcctagagaactctttcaggaatgttccctgcaagcaggagagaagaggggagagtggtatggaggggcagggtgccccttgctagaacgggagggacccgagccggtttaagtgcatttggactggcagatgtggaggctgtgggtgagggtcaggtagggtgatgagtcaagagggagcttcctgggaggtgacaggatgtggagcctgagctcagggggtcagaggttagcatgagatggcaagacactgtcctcggttgtggtgggggcaaggaggtgccctgtagcaagaatgaggccttcctctgctcggaagtgccccaccagctgaggccctacctgctgggattggagagtctacctgttccccatagccctccttgtgctcattctgacaacgtccccatcccatgcctctatattgctgcagccctgagctgcatttgtgccagggtgcccataaacccttgagtggcctggtcaggactacaggtcgcgctgtgccgggccatctggcctgtgagggaggacgtgggctgcacgccttcccagtcactgaggatggtaaacttggcgcttgctctatgactctggcctggccgtcctggggactctggaggtggtcatgggggtattgcttcctcttggggtgagatgagagaaagaagaaattcagcgcatgggcagggtagggctggggtgggtgggcagtggaagggatggacgttcacaagagcctgtgactgccagagctagggcccggcagtgaataatttcacttatttctcagcgcaaccctgatttctcagatgttcgaattgaggctcagaggagagaagagcttcctcaaggtcacacaacattgctcttatgtggcagagccgggattcaagccctggctggtcttgctcactatggacactacagttctgagactgcaaatggagcctgagtagcccttaagtgcttcagctcagagcctccagagaggaggagcgccaggctaagagggagggtgactgcgagcccgcagactcaaaaagaaatgaagcctgagatgaaaacacgttaacacaaacacaagaggtcaaaaccctgggtgtaggcaaatggaattcaagtacccaaaggttcattcatcgttagaggagagcagaaggactgtgcaacgcgaagtcaccccgaggcacagggccagcagaggaggaaccatttcacgccattttctcatccaggagggatccttcatttctcagaattgaataaattaaagaagtgaatatgcaatgggagagagaggaaatactaataactaccagcatgtatgggtatgctgaacttcagcagtgagaggggaaatgcagactacagccataagataccgcactgtgtaccatttagataggtactttttttttaaagtttggcgatatcacatgttggcgaggctgtgagtaatcctaagtcacatatagagagtaattgggctgtattcattaaaattaaaaacgtgcatcctgggcaacatggcgaaacctcatatctacaaaaaatacaaaaatttgctgggcatggtggtgtgcccctgtggtcccagctattcaggaggctgaggtgggaggattccttgagcctgggaggcagaggttgcagtgagtcgagattgcatcactgcactccagcttggacaatagagcaagaccctgtctaaaaaaaaccccaaaacaacaacaacaacaacaaaacatgcatgctctgcaatctaacaattgtgctgctcacctctgtcctgcagagagaactacaaatgcatgggtagtcacaatcaagcatgcccattgatatctaaaaatgtaaaaacctgagtgcccgttagtaagaaaatggacaaactgtgctatattcacattagaaaagacttgaaaagaatgagatcaaaatatacaagctaacatggttagcttctcttttatccagcacctcactgtcttcaatccttgtctccaattcctgccttgttttctctcactctctcttttagacagagtctcaccactacattgcctaggctagactcgaactcctgggctcaagcaatcctcagcttcccaagtggtggggctacgggtatctgtcaccgcacctggcttctgttctctgttaagcttcagtcaggcttccccaacatccgtcccaccagaactgctcttaccacgttggcaatgactctcacattgttcaacccaagcgtccagtcagtcctcccattctttggccctttggctacacttgattgtgaggctgatccatcccagtcccaggaccactttgtactcctgggttccaagattatactcccccgcttctcccctccctcaccggctgtcactcccatctccccgtcttcctgacctctcagtgctgagtgtgcagggctagtccttggcccccatgtctgtctatatctctgcctcatgggtttggacaccatccatgcacagaaggccctcatgtggctcaaccctggccttgaccctgccaatgctgcatgtccaaagcagaactcctggtctttccctgccccagaacccactcctcccagggttcccccatctcagccagtggataccccatcctcagatattccctgctcccagctgctttgtttctcacccgagttactgctgcagcctcttcaaaagagggcagccagcaagagttcttaaatgtgggacttagatcacattgcgccctgtgaaaaccctgcaggttcctgagctcgctcagagcaacagtcagatctgacactatggcctatgagggtcctggggaccggccacacggcctctcggcctcctttatcctctcttgtcctggccgcactgtctcctgctgttcctacagacatgtgcccagcatctggctctacacctgccatatgccctctgctctctgggccctcccggatgccctagggttcctctctcagccccttcactctttactgaaacattactttttcaacgacacctctcttatcactctttagaaactgcttcccccactgctccatttctccttcctgctttacctcaacatttacttcaattatattatagaagtggaagaaagtaagttgcagaacaatttacaaaatataaaactacagtagtctccccttattcaagccagggatatattcttagacccccagtggatgttcccagacccctgaggatgcctgaaactgcaggtagtactgaaccctgtatacagtttttcctatacatacatatctatgacaaagtttaattactaaattggcaccacacttttgtgctctggagccattattaagtaaagtaagggttactggaagacaaacactgtgatacagcgacagtgcatctgacagctgagatggctactaagtgaccacaggcaggtagcttagacagtgtgaagatgctggacaaagagaggattcatgtgctgggcaagatagagtgggacaccacgctactcagaacagcatacaatttaaaacttatgaatcgtttatttctggactgtgggtgtccatgggtaactgaaactgcaaacacgatactgtggatatggggaaccactttatataaaaaggaaagaaaaacaaaaatcctaaacaaaagacattgcaatgtattctcagcgggtgctcgtgtttgtacacagttaggtctggaaggaacatatcccacctagaatggtgataatgttcctaaagggaagcccggagctgttatattgtacatttcatgaagggaatgaatttttttattatataaattacaattaaaagttttaaatgaaagagctcttttggagtggagctggatccccttacaggagttctaaaatagcaattaaaggatcattatttgatacatgcttatgagtatttatctgagacaagcatcacactaggctctggaccacagcaagcaagaaggtcagagcctctgcctgcatggagctcccaagctagtgggagagactaacaccgatcagcccacaacgaacaggccaggatgctggtggaagcctggaccaagcctatctgtggtcctcccatgggaccaccatcagggaactgtgagtgagcacactggtccctctctgcaggtgagctgcttgggtgagcctgggactccagcctgcctcctccaccccgtctctctcttgccaaccaggggctcagtgagggtgtgtggatcactcatgggccgagccctgcactgacaagagcacctggcagctgccaaagctcagacattgctctctgagatcatatggatcatgatggagctctgcccaaattctcttgaatcccttttcctgtgtctatttccctccccacccccaaatgtgctgtccttccaacagtcttcccaggggtgggtggtggtttctcaggattgctgacaggttttggaagaccggccttgggctactggagcctgttttgcccatgtactgggaagactgggagtgcctaggagtttatatcatccacccctcgcccaacttaggagcttaaaaacctctaaccaaccttatttctagctaggtacaggggtgtacttcactcttcagttgggggctcaggctgagacctccctttcctgttacatctgaaagggtaacaggactttgctcatgtcctgctttcggatccccctccccctcccccccaactgtgtcccctgagggtctcgttaatagattactgcatgtgaatccttatctcagggtctgctttggtttggagatccccactgaacatattcattgttttcaggaccttttgaatagactgtggcagcctttgaatagacttgtgcctttgagcagctgctgggctctcagctctggagatactccctggggtgaggcaccctgccgtgggccagggatgtttcctatctgcagctctgtgagtgcagcccctagagcatggagaagtggctgtaggacaagagagctaaaacacaattgatttatagaagtcaatgagattttaaagccgggctgggaaaagagcaaaatggatctcagagctgaattgatttaaagggtaagtattgagccaaaagattgattgaggagagagagatggggtattggaagggcactctggaggggccgggaagagatggtttcatcaagttaatgcaatttgctgccaagggcaaaggggacctccttccgggtcccacaccgtcctgggaattgtgcacaagcatcagatgatttattacctaatggttcttgagtgcccctacttttaaaaacttgtttatatatatgtgtatagttttatttgtttatttttttttgagatagagtcttgctgtatcacctaggctggagtgcagtggcatgatcatagctcactgcaggctcaaactcttaggttcagatgattctcccacctcagccttctgagtagctgagattacaggtgtgtatgactatgcctggctaattttttttttgtaaagatggggtcttgctatgttgcccaggctggtctcaacctcctggcctcaagtaatcctcctgcctcggcttctggaattacaggcatgagctactacacccagcttaatttgtgacttgcattcttcctggccctaattggccacctgtttgttcctaggtttccatctaaggggatctagagaatgagccaggccctcctaatgagcctcgcctcggcatgaagaactagagccaataaggtgcacagcctatccattcctgcccccaggagtgaaaatattaatttttaagtagtgattaggtagattagagagtttggatttttttttcatagtgaatactttaatgatttaacaatcaatataaaagattgcattcttgaaagttattttaatcaatgcttcctgggtctgcctcctggctcagctgaggctggtattcagcaagggcagtgggaagccgggagacacccgaagtgtttgctctttacttccatgcaggatgcagccctagattcaagcggatctggtgttcatttatccattcttgagattatggggcctcccgtatgcccacctgtgagagccactgcatatggagacgcaagacacacacctgccctggcagagctaacgggggacagatgccccaacaccagatcttgctgtcatctataaagggagaggggagtgtgaaggcagcagcagtgagacagtcgggcttggggtggggctggctggagggggcagggagccggggtgaggtgaggagggatgaatgaatgaggtgagcctcactgagaggtggagtgtgcccagcacgggaacaggaagatgcagaaagtgagagggtgagtccagaccaggaagtatggctccacttccaggcttttcaccctgactctcataggacccacattcctgtcttaggagagaccataccctaagcccttgccagactaatgaaaacccaccctctgagaaaaagcagcctgttggacctcttccaacttctgccttcaacccattctggtgtctctctcgtggctccttggaagagaccgtgccccctttacagggtgtagacagttttcgctacagccttagccatcagagacatgggtctgatgtggctgtgatgtggagggcctctgtgagctggtgcccagcttcctccctctcacaccacacacctgggtctctccaagctgacaggtcccgcatgggccattgtgccacacctccacccctgtatgtctgcctttccctttccctggactcatgactctgctggtgaatcctgactcacttttgaagcatcagtgtcagtgcaattacttcctaaggtatgaagacccctctggtaggctctcaacgcagaatgattgacttccatcccttatgctgcccctgggaccttgctgacacctctggctggacatgcacctctccttcataaacatgtgtctcatgtctgcgaatgtgaggcaggaatcctcaagtttgaagaggatgggaactcatcaaatccaagagactttgtgcctctgtagatgatctgcttgggttggaagaaatctgccaacaggattctcctacccacggcctgtttccacacatgaaaagctaaagggcatgagattactgattctctgcccataatcagagaagcagcaagcaggagagtggaaaagtgaaactgtagcttagcagtgggtgaggagaggcagtgggaggtcatggaagatgcacaggattctgagtcccgaggccctttagcctcttagagcctcaggtttctgtctataaatgggggccagatacggatcctgctgcttcctagactgtggtgaggatgaaatcaatgggcaattttctttgagagcagttaagtgctgagtgaacagtgtaggccctgtttcttgctcccgcaggctgtgccccttggaagcctctctcctctcttctggactttgttcaggggctgatggcccaggaccccaggtgcttgctgtttctgctctgttcagataagcaggccattcaccaagagcctgggatcggtaaaatcaatataattccatgtcgattataaatttcattttctgcctgcctatgagccattagcttagatcaatatattctctacccttggttaagtaatcactggggctggtgaggatttcagcagagtcagggcaggatcctgactaccttgctgccttggatagtggagtccaaggtggcctcctggcccacgcctaactcagttcaggcctgtcttgcaaataaatcatttatcccctccttcaaacaataaggtcatggccagttctccagctgtctggggctacaagaccagcttggagctgctccagcccagcacctagcagcactgtgtgttctgagtgtctaagagcactggtcaggtgggggcacttatggatgtctaacatcttccgtgggaagagaaactctgttttcccatcagttggttggagttatctgggaagaaggagaacatgagggttggtgggggaagaggcttgagtttgcagcgcccctcttctgggtacaaacagccaccttcatctcctggcatgaacctcaggcagcaacagatggactggtggcctaagggctgggtggagggtggtggctgggagtgtttgttctcagcttgtggtgctgaaacactctggtacttacaaactctgcagggcggggaggtgccagctgctgcccagcacacagctggcactgggggaagagtgtctggaagcagaggaacccagctctccatagatctgtttcaacaaaggcccctgtgtctccctctccttctctgcaggtggcagacgggaaacaccattgctcccactagcatttaccctctctccctgccctcagggccactccctgcgcacctgctgcccccactgcagcctgcatcattgactaaggctccagacaggcacgccactccattgtctaaaaccctgcctggatgtgggacaggctcattccctcacatcaccttgtcctcccactgccttcctgcattgcagccaccacaggggcacaccgcttgccccaggttgccacctctgggccttagcacagaggctttcacaacctggggcagctttcctctcttgctgcctggatccaagcctggcatgtaaatgtgaaggcacgcactatatgttcagaagcctttgggttcttgatcccagcagtgccccttcctggttgggtacccttcctggctggcaagttctttatcctttctgggactcaatttccttatccgaaaaatggggcaatagtggtctttttctcaatgggaatcttttgaggatgaagggagataatgcatgtgactgcacatgctaggtgcaataggacttcaagcaggaagttccaacagggctccaagccacacgggatgtgacattctaaagtgagggacaaaccaggaagcatgctttcaaagaggtaggtcaaagcctgctaccatggaccgagaaatgttgacctggtcttatatgttgcaaacaaaagtgaccctggggcacctctatccaggcatgcccagagttaacccagggactgccacgtggggacactggaggacacaagtaaagtcatttcatgtgctgtgcttgcttgacagcatgtcccatgagctcaacagtcattagtgtggttgttgcgattattaagcacttggtaagtgcatgaagagttaaatcagttctgactcctcatgtgagcagggaggggaagctacccgagcctgcagtgtttggaatagccaatcttttttcccagaaatatgggagttgaagtaaaatagcagccaaatctgggattcctcaacatcaccaggtggcaggggccaggcccatctgagcccaccacacacctttgtatccatggccaacacctggcaccactggtgagggctaactccacagggtgcccactgctctgtggcccatcagttccccctcccctttcccactagcctgctgcttggccaggctgactttcaggggaacaaatctgggacaggccagcacagagtgggtggcctgtctccacctttcattttggcccctgcacctagtgatggcattgtgcgtacctgccatggagacaggtgcttgtgagggttggacaggatctgacagctttgtattgctggcatccctgggggcatgagctgttcagtgacacgtcagcctccatctgcctctgtgcagcactagatttgggagggaggcttctcagatctcagagtcttgtgtttaagctgcttctgctcttattagtggtgcaattttgagcattttacttatattattctgcctctgttttctcccttgtctcacagagttggtgtaaagattaaaataggacatttgcatgtaatggaaggtccagcttgcatctggcacattctaaacactcaacagagattctctcactttccttccttccttaaagaggaaagtggaaggactgtttgtggcctttaatgtattaacagtggaaagtcatatccttgattgcatttatataaaattgaagaataggtgagatcactctagggtgctagaaatcagaaaagtgtcactctggttgggagacgagccagggtgactgggaagacacaggagaaaactttctgggcttaaggaaaatgctttatatcttgatcttcaggctggtcactgagagaacacttaagatttgtgcattttactctgtaaattatgcctcaataagaaaatgttaaaaattttagaaataaacaatgaaaatcccagaggagtattcaaaaaaaaaaaaaatcaggctgcagtgtgatttgaggccactcttgttcaaagatccccaaattgcaaacttttatttcctcgaatcaggttccccagggtttgtcctggaccctttgctgatctgagggcctctgcaacttcatttcacttctgagcaaatttttagaatggactgacaagagacagcttggttctctccatggggtggagtacctggctagtggcagaggatgtccaggcttgggcacctctgctgtcacggaaggttatcagctacaaacagtggtgccagggcctggcctggaagtagagactgctgggtgattccctttggtcctccttctccagagcaggctcttctgaggcctctagtccctggctaagctccagcccacagcctggatgcacccttccatgagcagttctaatacgccccttcttcagcatatcttactgaccattctgctagacctctgtcctctctctgaatcaggcaaagccagatgctgtgtcacctaattaggtgactgttccttagctgcttcactctcagagccatgaaggtggtgagagtcatagggagccatcatggtacctgacaaacctgggcaggggcatcacagcatcgccaagggcacatcctgggagccacaacattcataactaagcaatcccaggaggcctgctaaccctatgagtgtccctgaagggcagaatcttccagggctctgaaggatcccccagtctgagcaggtatgaggtcagttgacctctgggctgtgattccctaaccacttttcaagtagtcctgcagccttggggcaaaacccaggagtgtcctatccctttacttccattccccaccccacagaggcagccactttcaacatttgtcattggttcttttggtattacttctatgtttccagatagtatttatttattaccacttcttgattttttccttttaagtgttatttattaacttcttactatagaagatgaagattttgtttcttttacaccctttccccccaccatccataagcacccactccaccctcccaattagttatattaaaattttggttagattaacaacagaatttccattattagcaccgtttaattgctagtcccacttgaggtatgttatatatgataataatttttctttcatgaatcacttttgttttctgtggagttcataattgccttgttttttatttgcttagttttctgctaggtatcaataatccaacctcaaacattctatgagttgtctagatctaatctccatgtgtttagatgcaccttcttaaaaatatcattgcattttatcactgaaataatctacagctctcatggagatgtacagggccaggtgcagaggtcttcagatagtgttgggttagagagaaggcagaggccttagcattggacagacaaatttagatcccacatttattggctgggcgaccatgattcttctacatctgtcaaaatggtaacaatgatatcacattatagtgtagtcatgagaattaaatgaggtacaacaaaagtgcctggagcatgggtgcacaataaatgttggtttactttcttgtgggacaatcacaagaataaggccattgaaggtacttcatcatattaatagagctttctctccccacccccaaagtattgaccaggctctgaacattcatcaaggctcctgagacattgacactcctgctacaggagatggttaaagctcctataacttggcccatcagtctgatgatttcctttaaaagaaggagcctccttaatagcatcaacaattttattttgaaatattgcaaacaaagacagaaattctaaaaggaaaatatatacgagttaaaaacaggtacatctagaaaaaaaacccactctaatataaaaataaagggcaagcaacaaattgggaaaatatttgcaacatatgagtcagtgaaagatgaggccaaatttcctaagtaccgggccagcttgggtagagacagtgctccagccacccaggcaaatgctttctcctctatccagctattcatccactcactcaaaaaacacaggttgagtgtccaccaggtacctggcattgggggtataatgatgtccccgaacagaaatggttcctgctttcacgaagctcatggagcaatgcaagtgacagatattcaccaatcagtcacactcaggagtatacaactgcaacctatggtaaataccataaagaaaaggagagatggagcagaggatccagcctggactggggtgtgtgggaagacttccctggctggcaacacttgaactatactataactggagggtgaataggaattaaggtgtgtgtgtatgtttgtatgcatgaacgcatgtgcacacacatacaggcatgcatgtgcgcacatgtgaatgtgggaggcatttcaggggaaagaacgatgtgcaaaagccctatggtggaagcctcatggaacactgaggactggaagagggctgtatggctggcctatacgcactagatgccagtagcacccctcagttggaataaccaaaaatactccaaacaatgccaaatgttctctagtggggcaaattgctcctggttgagaaccattgacttaaaacaaacatttatgagaaatcctggatttcaaagacaggctgcctgtaagcccctttgctgaagcactggtctcttactagcactgtccaatagaaatataaaaaatataatatgagtcacatatgtacttgtaaatgttctagtagctatagtaaaagaatgtaaaacaggtaaaattagttttaataatagattttatttaacccaatatatccaaaatactgtcatttcagtaaaataattattaatgagatattgtacattctttttttgtactaaatcatcaaaatttggtgtgtctttttctcaatttggactagtgacatgccaagtgcttagtagccacatgtggccagtggccagctcattacacaggagtgggagggtggaactaagctctcgcagaggtatctggcttgtcctatcccttgggtcatcactagacttgccccctcctcagcagagccatgcaagttcctcctttgcccattggggtacacagggttcagcccatgcgaaagcaccccacagaggggtcctgacgtctgtggaacacactggaaggctggtcccatccaggaaaatcatccaagtgcttgcagtgtgctaataagatgggtgtgttccctgtgaatccacaggaggctggaggccccccgctgcaaacacctggtgagacacaaactgtttccaagctcccaggcaaatgctccatccacctccaaagacccatcctccacttcattgtttacaaaaggagctcagccctcccagatactggccacctgaaaagacacattctatttttgtaaaagacagatgttctcattcaaaatgacactttccgtggctaagaagttgttgtccatggagatgctgtctctagccccatacagtggccaagtcttcaggtcactgtgctgggtcgctggctggacacaggctggctagcccagtcctggactctcctgacccccatctcttgctggtctgagtctgctcccgcatccacccgtcctgcccccagaccctgcagctttctgagtgttctggcaggaaagcctgcctgcccctggcctgcttgaggaaatactgtctgcaaagcagcgggaacgaagaccctcgcttgcacccagctgtctctagaagccagggcatggccttccctggtaaggggtgcttctgtgttggccacagggcaaatcttgggcatttcctttttagtaaagaagcaaagtttccttaaagttgccaccaggtcacctggagcgaccgagggcctctgtaaaatgtggaatgtggggcgaagtgtgcacacccactggggcactaagccggccaccgcccttttgcaacttcaggtcgtgtccccacccagcccaggagtttcacgaggaagggcacttcctcaggaggatgctcactattcagcggcaatggtcccagaacgcccgccccatgtgacacatggcgtgacggctggccaagtgtccgcgcacgtttgccaagaggcacatgcggtgcccagagaaaccccagaaagttggacttacccctcctggcctgcctgatctttgggctcagcatgttcttgcagccgtccggccagccccgcagggccgttcatgctgtcatccacttgcttttgctcgtcctcgcgcctagtcgcccctcatgtcctgctcgttcggggccccgtggccgctggcgtcacccgtcaggctccctcggctacctctcctggctccggacggacggctcgccttggactacataaacctcgatgcattatttatccatcccagaattaattcccatccaagcggaccattaaagcctcagtaatcactgctgatcaatcactggaccagggcggggcagtccctccgcctggcctgggcgcacgcgtggctgtccaagctgagcgcgggggcggggcggggccgagaggggcggggccagccagagacgcggggcgcggtcctggcccgggagagggtactggggttccggccatcctttgctgaggctggaagaaatgcgcctttcagccgccgcctgggagccgcactccctgccaagcccgggtgggatagcgctttggtgagaaggtagccgagaccccccccccaccccagagcccaatccacggggacccgcttatgagctcactgttttacgtgttgaaagtcaggtgtgtctgggaaggagcaagcagcccggcaatgtaaactcctcaggagactcccaacaggaagatgcctgttagggatactatttatgcctctttagtaaggtgacaggaataagagggcaggaagcacttaactcagggctcttcataggaagatctgaattgaatagtgaatctctgctaattgccatgtttctgtttgatgctggcataattttaaagggtgtatactggggctttgtgaggagcggaatccagcctcaagatgctaaaaattacccaaggaatgcaatcataacaatagctatcatttattaggcacctactatgtgtcaggcactgaggctggtgctttacattcaatatctcatttaactctcaaactcctgaagcaggtgctatatatatagcgtttcaaatctggaaaataaggcacagcaaggttgaatcacctgcccaaagtcatacagtaccgagcagcagggcgggcaccagaacccagggctgtgtctacagctcctgctgctctgtgatgccagcctctccaccctattcccatcactgcatggtaacagctcctggcttgagcccccgatgaacttgctgaacggtgacctgcctctgtgcccctgataatcactccgtgtatcctcttaggcatctgagcttgggtctggctatttgggcctgagaactgtgtgaccctttcagtagctggtaaagagggatttgaacaatgccctcccctgctcagatggccatagcctccatctgaccctccacactccctcgagtgccccatgtccacagatccccaagtgtcctattggtatgtaatcaactttagcagctgtagagggagagagcccaccaggagatcactgtggcagtcctccctagggaacagtgtgccctatggagaggggaggactgcagagtaagaagaaagactcaccaggatgtggtgagccacatggccaagctggtgggagaaggtagagtccatggacacaaagctgtcttactcagcatcaagtcacttgttctggtcttcagctactcctcagagggatgaatgagtaccttggcataacattccaggttctttcatggtagcatccatggactcctctctgacctatctcttgccgatgctctatacaaccatatgcacatacagcgcctgctcctgtgtgccccagtgactttgcacatgccttgctcctgtgtgttcctgttcttgcatgtgcagcccctgctctcctgtgcctctgtgtttttgcacatgtagctgtgtctttgcacgtgcagttccctctctctggaatgcccttcctcacattgccttgtcctctttgggcaattccccaatgaaattctcctgattccaccagcagaatgagccactaagcacttcccctgggcccttatctatgtccctgtactgcccctcttgtacgccctccctgagccccaggctgactcaggccagaagcctcacaggaaactctggcttcatgggcagatccaagaaacaccactgaatgacagaactgacctccttttcctttaaggccaggtacaagccctggttgggacaggggccacccatgaggagtggggagaatatcaagctagaaaatctcatgtcgacaccagggtcacagggcaagtcctgtggcttgtgacaatgtcttgagcaatcaggaagccatttgtgagtaatgcagcctggaccacttcatccaagtcagaggcaaggaaatgccctgagacttagtctgggtccactcacgcttgttttggttaagaaaccacccccaggcgcttttcctgtgcagctgttttccctgatgatattaagtcactgtgttcactcgcctgcttttctggggatcagagctgggctcacaccccagaagtcaggctgggaaaagggcaggagttgatctacgttctgcgtctgagaaggctgggggaatggggcaggtgggcaaagtagctcttttctcctctccaacctcagactgtgctctcagtacttcctgagatgaagggtccacagaggcaggaattggagccccttcatcctgaagtttaccagccctgatctgcagggccctgggagcctcccacttcctctggggtggcctgtgggaggatggagtggggacaagggcagggcaaggggatctgttgaacatgtgacctcctataagcttttatttgaagaaccagccctactcttctcacttataagtgggacacccagaccaaggagtgggagatacaggtctagcttagcagcggagacagatgcctccttctccactgccctgtgcctgcctgcacggtgctgcccctttccagcagtggtcctaggtctgccttcacctggcttcctgccttgaatcattcagtattttctaagggctgttcagggacagaagctgagcactgaatggacagaagtctccggaaggcagaaggcatctattgaaatgcacacctgttggtgggatggctgccaatcagcatcaactggcccagagccaggataccttcaaaacagtagttcctaaccttggctgcacattagggagctctgacagtgaattcctgtgtcccacccccagtggctctgatttaactagtctgcagtgtttattgtcattgggagttgtaaaagctcctctagggattcagccagggttgagaaccacagctttagaagacaactgcacatggggtgtttgctggctgccatcctaagggagattcttctcagggagaggcacatctgcgaataaatctcctggtcagaaagtggaaagggcatctgtcccaagccccaacttgagacaactccacccagagccacaggtgctgttggatggtctgtgcactgctcaaaggtgtccagtagagggaggtaaggaggctgaatttgggctccattggcaaagccctgtgttccagcacagggaggtggggaggtgtgcagctagaggagggagctttcctctaatttgcacaaaggcgacatatagatagcaaagccctgcttcccctgttccagaagctgcatggaggaccagagtaagcccttctggaggcagaggagagaaacaatgctactctggctttgtgatgcctgcccaggggtcaccagcacctgggtccccagcctgcctgcttagtgcactctctgttcctgctgccaggaggtcgatgccgcagctcccttgcatgtcactcaaggtcttcatgggcagctcccaccctcatactttggtttctccttctgtctatcccagtagtgggccggaccagctggagagtaccaatgacataactgattgttaaattttcaggagttttgtaagccagttgtttagcaagaacatcattagaaattaatgtatataaacttataattaaataaactatttaagacaaaggtaacaagcactaaaaactcataatttccaaatcattttactacattttattattcttcaggtaattgacatctattgtttctacatggtggataatatatactgggttgctgccatgcatctcttctcaactctaatgttcaatgacatcatgctggtagtttgaaattgaatgttgtgggagtatttacaccaagaaaactagcaaatgcagtaaatcagagcttagatgtcttgttttgttttgtttttcttctacagagctggttgttaagcatttgtcagcacacctctggcccatttccaccacattcactctgtctgccccagtcactgtagactccctgttctaggcagaggatgccagctctccacctgaatctgttctccccttcttcctgggaacacacagatgttctacatttccagcatccttgcagttaggtgtgactgcatcctggccattatacatgagcagaagtgatgtggttacttctaggcctggcttccaggattccttctcttgctacccttctaagctcatttcccttttctggttgattgggatgggaccactttggaatgcccatgtagaatatggtagaatccctgcagtctggggctctgaatgactgcatggagccaagccctcactgtcaacctggaagtatcttgagagaaagagaaattaacttatactgtattgagtcatttcatagttggtcctcttcattactatagccgacattctcactgggtacacactccactctgcctgcccttttttgcctcttgaactttgatgcatccctctggaccttgttccagcaccacctcctcactcagtgctgtatggagttcggcacctttaacatttcccatttcttccatgcccaaggccacggggaccttctacaaggcctgttgcgagatctttagaggagtacgagtttttcctgccccctcacccataatttaaatatcatctatatacgaaacctatcatatgctgaattaaaaaaattcttcctagatttttaaattgggaaactgtgggattcatcaaaggtgaacttttgctccactttggtggccttgccctgcttgtactgtaagcctgtccttggtcttcctgccattgggcacttgggcactgcaggctgctctgtcatagagggaatggcctttctctccacccactgttcctggcttcagctctgctgccttgggcctaaagtctgtctccgccctttggctccaccatctctgtccccttgccttggcttttcatttcagttttgcccacaccctgcagtccatggcataccctccctttgacagctcaggaccccagaaggggtctaaagcctggacttctacctatctggggtctttgttgtcttgggatcctgaacagaaggacaaagacgcagaattaggcactaggaaaccacccagacataccgagcaagagagttcagaccggagcacagaggctttgcttggaaagcccctggattgcaacctgtatccttgggcatgatttctagagtcattcagccctggtctgtgggaaaggtgacttaggggcactgcattggctcaggcaccataaccataaccttttgttccaaccactgttgtagcacttgtcacacatcacctttaactttgcaacagttaagtcagaggatgcctagtgtgggctgaatagatgaatgagtggtgcctcagctgggttccagtggcagatgctgaggtaagagtttttttagggattaacattttgctcaggaaaggagggaagcagggatggggaggaaggtatcagagcacactgcatacctgacagtattgctgccagcccaactggcgctccgagcagatgacccgctggaggggtctgggtttgggcagaggtggccaggacttgtgcagtcattggcttggagccacccaagaagggagtgaagttggctgtaaagctaagagtcaccctaaaagagctaacagctagcagctgtcagctgacttcactcctgcagttgggcagtgagtccttttcagaagcaggctcagagcggcttagttccatgcctaccacacttgggctttagagcttgcagactcaattttaagcctctgtaaatgttggattcatggaaatactactcacctaggactctttgatccacttggacaactatctgggctgctcattgaattgagcagctttcaggtaaagaatttattcagctgtaaagtctgtgggtttctcacaaggggaagcttgtattagagtgagtgtgggactgatagtagcacaggctctgcctgtgagtgctgggttctcacagggtaccttggaaagcagcttcggagggaccctagcttaccaggtgtgacaccctgggctaggcagggtccctgcttacaggagttagaggctgagacgaaagagtgaaacatgtccttgctatatggcagtcctgtttctgggtcctgggaacatgatgcactgagattcccaaaagctgccccccttcctagaaaagaaggggggaggtcgctgcatcagctgcccaggctccaaaggcaacccctgcccttccccaaccgtaccaacaaggaagcaggtctgaaatgattcccttccctgaaacttaggtaaagagtcagattttaggtaaagagtcagattttagaaaatgataaatcaccattttgatcagctttgcactattgaaaatcaagccttctaccttgagaaaatagctgcttgttgaacagatagaaagagtggaaatttcccaggtgccttctctcattgctcacacctctcaccacagtcaaattcttccctgccccactgttctgagcagatgccacaccctcgatccctcctgtaacttcctcctgctcctttcccttcccttcccttctcttcccttcccttcccttcccttcccttcccttcccttcccttcccttcccctcccctcccctcccctcccctcccctcccgtccccttcactttccttctgcctcctgggtccatgcaattgttctgcctcagcctcctgagtagctgggactacaggtgcgtgccaccacacccggctactttttgtatttttagtagagacggggtttcactatgttggccaggctggtcttgaactcctgacctcatgatccgcctgccttggcctcccaaagtgctaggattacaggcgtgagccaccacacccagccaacttcctcctgcttttctatccatttcccctccttttgcatctttaatccctccctcattggtgcttttttccaagttgacaaactccctcaagtctttcctgctctcaagattatgcctcctcttcacctcatctgttatagtggaatggaatttgttttttggctgtaccatgtctagcccctccctgttttggaggtattccccatctccctcttcggaagctacaagaatggatctgctctatatctggcaggcagttggatgtggtcatgtggctgaggctcagctgagcagatgaccctgcctgggttttgaatctcatcttgagtgtgacccagagatggacagagtcgacttctcagcactggtggcagtgatgacacctgctgtgatgatgaggcttttccacaggtggcactctgcaggggtgtcctccccaggctcttcctgcaagaagactatacttgtgcttcctgcttttaggctctctgtagccactatcattctgtccattttctaacctggtcctccagcttacaaaggatttttccaataaattctcttttctggctttagctgatttggatttcctttctgtgactcacaacccacagaattctaactgatgcccacattatgcctctctgccatgttccccattcctgttctcctctctcacttcctaatccttttaaattggcacagatggtgcagtcccccacttttccattctctcactgatggcatttccttccctatctccccagttatactgtcagcctcatcactgtatgtctcaggctggaaaccacaggtcgtccttcaaaaccctggacttttggttaggaccgatagtaatctcagctcaccagaaggtgctgctggatgatgccctcctacctctgaccaacacttcttttctcccaaccttttttttgtcctcatctgtttcaaaatccagctcccatctcagtgtacacctttggcctttgtgagagtctcgtgcacatgtgctgccttgctttagtgaggcctcagtgactcttcttttaaggctctcttgtgtgtcacatgcttcttaatggagcagtttatactcatcatcatgatatggcctcagtaaccactaccactgtcatgtgacagaaactgttttcttggaggtcactgatgagcatctagtttccaaataccctcagtactcatctatcccagttaaaaaaagacaagggctttatagtttagtaggaagatggtacgtttgaagaacccttggtttgaatttcttaaaccaagcattcactgtatcagttgatcttcttaatttctggaccattattggaaccagatagaaggaaacttaagccaaacccaagtttccagtagttcttagacctaggccagacttcatggtgccatgcccttgtggtatatgacagaagtacatctaagtggagaagtttagaagagaattggatgtaagactatattgtttagaggagagttttggctaggaatataacttttatagaccactgagaagaatgtaaaaaaaaaaaagaatagaaaaatagagaggccaggaccaaactatgagaacctccaacatctaaggattgttagaaggaggacgaaagtttacttaaggaagtgctatggtttgagtgtctcctccaaaactcatgctgaaatttaattgccattttgatggtattaagatgtgagtctttaaagaggtgatcaggccctaaggacattgccctcatgaacgaattaatgtcattattgtgagattggattgttataaaagcagggttgatgttctcttgaatgctctctcttgccctaacttgcccttctgtcttcgcctggggctgacatagcatgaaggccctcaccagatgctggtgccatgctcttgggcttcccatcctccagaactataagccaaatacatttatgttcactataaattactcagtctgtggtattctgttatagcagcataaaatggactaaaatagggagctaatcaaatatgggcagagagatgggagaaaaccctggggaatatggtatcataaaagccaaaacaggtttagtgttttcacaaggtagtgtctcactctgtcaaatgctgatgagagagttagacagttgagaagaggacagtatttaccagatttggcaaaggagagttgtttataaccttaacaagaatagattcattgtaggagtggagtagggtgccaaactgaagtggattgaaaatgactggtgaattccagttccaggaacattatggattacatgctacccaaatccccttatgaaaaaagccccatactcagcatgctaaatataatacagaacactcatttttaaaataaatagctgaggaaaatggtgtcagttaaaatggcagagtaagacatttcaaaattctgtctcctgtagcagcagcagcaacaacaacaaaaaagtgacaaatcagtgttttggaatctagaaactaaccaacagcttgcatcagccaggggaatgcttaatcaggaaaacccagctgagtctcagtaagaacagcaaggtttgttgcaatttaacttaccctagtcccattccagctctccaataagcaagagtcttgcaaatgacagccctggtgacagtatcattactgtaggaagcacaatggacttcatctgcaaatagctaaaattatttgttttgacctatttggtagttacccaaaagctggttcaaaggcttgccttcatctcacctaacacagaactcttccaatgctaaagcagatatctgtggaattttgtcaaaaacatttagaggaaaatgttttactcactgctgcctcaggtggtggataatagttggagcaaaaaatagactaacctaaagctctggagaaaaggctggtaaacaagatgctttgaagagtaaggactttgaaaagctgtaacatacaaatacacatgccaaggttgtgtgaatgatcaggaaagacccaaaaagacctgaaactctaacctaaggccaacctctagactctgctcaagcagaaagtgaaagctaaaacacggttgtaaatttctgggctgagtcttgaaggcatgcttcaacacacccacacagcaaaaatatgggagcaccccttgcccccaggtatttaaagaaatctctgtcaaatcgctaactgaccattaagctaatggaacaaagacttcaatgaccacagatgataaagaatacataactcacaaaaattatttcagaaaagttattaaacaaataaatgatggaaactatgacaagcagcaacaacagatcctggaaagaagagaaaatcttatttccagaattgccatattatacaattcaaagtgtccagttttcaacaaaaaattatgaagcatgcaaagaaacaaaaaatattgtccagaaacaaagctacacaaagtatggcttatttttttgatgggaaaaatcaatcagtagaactgtccataatggagctcagatattggacttactagacaaagactttaaatcagctatttaaaatatatttaaaggtttaaggaaaccatgtacaaagatctaaaggtaattgggagaatgatgtatcatcaagtactgaacttcgatacagagaaattatataaaaagaccaaatagaaatttaagagttgggaaagtacaataactgaaataaaaaattcactagagagactcaagagcagatctgagctagcagaagaaaaaattagtaaatgtgaagaaggtcaaatgaaattattcagtctgaggaacagaaaaaaaaaaaaaagaatgaagaagatgagcaaagcctaagatgcctgtgggatattgtcaagtacaagaacaccctgttgtattgagctctgctttattgtgcttcactttattccacttggcagatattgcattttttataagttaaaaatctgtggcaatgctgtgtcaagtgagtctatcagtgcctattttccagtagtatgtgctcatttagcgtcttggtgtcaacattttttggcaataaagtctttttaaattaaattatatacattttatgcttaacggactacaatatagtgaaaagataacttccatttgcaccgggaaaccaaacatatatgtggctttctttttgtgacattcactttattgtgatggtctggaattgaacctgcaatgtctcctagatatgcctacatatgcatagaggaagtccaagaaagaaaagaggaaaaggagaagaagaatatttcaaggaataatggccactttccaaatttgatgaaagacatgactgtatatatcacaacctcaatgaatcccacatagaataaattcagagatctgtactaagtcacattataatcaaattgtcaaaagccagcgtcagggagagaatcccaaaagcagataaatgacttgtcatacacaaaagatcctcagtaagattagcagctaatttcttatcagaaactagggaggccagaggcagtggagtgatgtattcaaaatgctgaaacaaaaacctgtcaactgaattcaacatctggcaaaactatcctttaaatgtaaaacagcaatcaagtcatttctagataaacaaaaattgagacagttaattgctagcagacctaacctacaagatctattaaagtgagtccttcaggctaaatgaaaagacactagacagtaactgaaattcacatgaagaaattaaaaatagtacttaagatgaccatataggcaaatacgtaattattaatttttttgcaacttcacttttctcatgttatttaaaagacaactatgtaagacaacaattataaatctgcattaataggcccacaatgtatacagatgtaactggtagtaataacataaatttggcaggggggaacagagatatatagaaaaaaagttttgtaatactattgatattaagttggtattagtccaaactagagtgtcctaaattaaaatatgatcccctatgcactcaacactggaccactcagatatacaaagcaaatattattaaagctaaagagagagatagaccccaaatacaatgataattgtgaacttcaatacttcagtctcagtgttagacagattatttagacagaaaattaacaaagagacattgaacttaaactgcactttagaacaaatggacctaacaaacatttacggtacacttcatcctaaagctccagaatatacattcttttcatcagcacgtggaatattgtccaggatacaccacattttaggacataaaacaagtctcaacaatgtgaaataattgaaattatttcaagtatcttttctgatcacatcagaataaagctagaaatcaattataagaggagctttcaaaatcatacaaacacatgaaaattaaacaccatgctcttgaccaaccaatggattgataaagacatttaaaaaactttcttgtaacaaatgaaaacagaagtacaacatataaaaatctttgtgacacagcaaaaacaatattgagagaaaagtttatagcaaaaaatgctacatcaaaaaagtagaaagatttcaaataaacctagtaatgcctctcaagaatctagaaaagcaagaacaaaccaaaccccaaattagtagaagaaaataaataataaatatcagagcagaaataagtgcaactgaggcaaaaatacaaaatatcaacaaaatgaaaagttggttttttgaaaaaataaacaaaatggacaaaccattagctagaccaagtatgagaaaaagaaataagactcaaataaatacaatcagaaacaaaagaggagacattacaactgaaaccacctaaatacaaatgatcattagagattaatgtgtacaactatataccaacaaatgaaaataaataaattattttcaaacctaatggaaataagtaaatttctggacatatacaacctaccaagatttaactgagaagaaatggaaaatgtgaacagaccaattatgagtaatgaaattgaatctgtaattaaatgtctcccatcaaagaaaagcccaggacctaatgcagaattctaccaaacatttaaagaagaaatagtacaatttttttcttaaactattccagaaaatacaagaggagggaattctcccaaattcattccatgagcctagctataccctgatgcccaaaccagataaggacacaataacaacaacaaaactacaggtcactatctctgatgaaaatagatacaaaaattctcaacaaaatactagcaaaccgaatccagcagcatgttaaaaagatcattcaccatgatcaagtgggatttatctcagggatgcaagtgtggttcaacatatgcaaatcaataaatttgatacattagatcaacataatgaggcacaaaatccatgtgatcatctcaatagatgtataaaaaacattagataaaattcaacatcccttcatgataaaaaattctcaacaagttaggtacaaaaggaatgtacctcaacacaatgaaggccatatatgacaaaccacagcctacatcatattgaatagggaaaagttgaaagcttttcctctaggatctggaacaagacaaggatgcccactctcgccactgttatttaacatagtactggaagacctagcctgagcaattaggaataaattgagaaagatgtaaagaacatccaggttgcaaaggagaaagtcaaattgttcctctttgcaaatgacatgatcttatatctagaagaccctaaaagccccaccaaaaactcttagaactaataaacaaattcagtaaatttgtaagatacaaaatcagcatacaaaagcctatagcatttgtatacaccaaaaacgaactagtggaaaaagatatgaagaaagcaatcctgtttacaacaactacaaaaaaatacccaggaataagtttaaccaaggtggtgaaagatctctacaaggaaaactatgaaacactaatgaaataaattgaaaagaacacacaaaaatagaaaggcatcacatagtcatgaactgaaataattaatattgtgaaaatgacaatcttaccaaaaactctctgcagattcagtgaaatctctgtaaaataccaatgacattcttcatagaaatggaaaaaatgagcccaaaattgtatggaattacaaaagaccccaagtagtcaaaggaatactgagcatgaagaataaagctggaggcatcacactactgaacttaaaaataaactcaaagtgttggaaaccaaagagcatgatactggcataaaaacaaacacatagaccaatggcagagaatagagagcacagaaataaatccacagatttacagccaactgatttttgacaaaggcacaagagcatacattgggggaaggacactgtcttcaataaatgatgttgggggacactggatatctatgtgatctatgtgcagataaatgaaactagacttctctcatactgtatactaaaatcaacacaaaatggattaaagacttaaatgtaagacctaaaattataaaactaccaaaagaaaacatcgggaaaatgcttcaggacattggtctgagcaaagattttatgaagaagacctcaaacacaaaggcagcagaagaaaaaatagacaaataagattacatcagactaaaaaacttctgcaaagcgaaggaaacaacccaaagaatgaatagacaagctgcagagtggaaaaaatatttgcaaactatgtatctgacaagggattaatatccattatatacaaggaactcaaatacctcaaaaacaaaagaacaccaaataatttgatttgcaaacaacctggaaagctaacgagcaaactattctaatgtgtgatacactttagtgtattacctttgatcagtaagaaaatagatttacttcaagctatgaaaatacagctttctgggccaaagtcttgggaaagaatgaatcaatacagttcctcacagagtttattgggttggagcacagttgattcttgctcatcctgagccacggagctgtatgtttgtacacacacttgtacatgtttttttttttaaagttggacagtttcttaagtgtttttcatacactgtcttcccatctcagataggtagggcatacattatcttatccattggttggatggagaagcaggctcagagatgttaagggactttctcgagtcactcagatcaagagtgacggagccaggagtcacactcatatcttctggctctttatcttcatggattcccactgtgcaatgccacagggttgttttcaactggccatggaaatcatttccactttgcttcagttggggccttgatcattccttgcctaaactatccagctcttctgctcagttcccagcctcccaaagctctgactataccaccttgtactgctcaggagccatgctggggtataagctgaaatccagcatggggagatgaactggcccataggctgtgggtggagagaggaaatgttagttctctcacagaggtagtgaacaaagtacatagggtgcagagtagggagccacccctctgcccatagacaaagacatttaggttggagtttcacattaatttcaacatccatgacaagacgtctccccactctggccaaattcaccagtgcactgggacttgaagcccaggctccaaggccttgctgcttcaccttcctcagagggaggagttcaggctgccagttacaaacaccatggccttcactgtcacttcacaaaagtgggaggcccacatcaagaggtgaagagcaggatgtgcagagcactctagcaagcttggtgtgttactcgcaactgatgactgctctttccagaaagcccaatacatgattgcctttgcatggccatccaggctattcctacatacctttgtcttagactctttcattgtatatgaaagtacattatacttgcatttttagtaagttatctttttaaaggcatgtacatctccattacagctttatatttctttattttttgcaagaagttgtccttatttttacatttttgcctcatttattttggttggtttaaacttgcctcatgtaaacatgttgtcatctctgtcattttgataataatacttttcagatcatttataatcttatttactcagcttcctatgcaattcatattataatatttattcaattacacactgaatactttaagttggattcttattcagaaaataatttaagtaaatggtaactattgtgtactccaaatggtggaggatttagatatgccagatttgttaaaagtataaatcacactattgtttatcctagtatcctccatctaaaatctattcatccctagatattacatttgaccctgggtggcctcagccttcaaactcagggcatgttggggcatggagtggtgcctgtagaaaaaaggtttagttgatttataatgttgttgaagtcttatttcattgctggtctttcgtctagttattctgttattggaattgagatactgaaatttccagttattattgttgcaccatttatttctctctaagtctttctggttttgcttcatggactttggtgctctagctaggtgaatatatgtttatattgttatatcttcttgaaagattaatgcttttactaatatatattatccttctttctcttttgtaataatttctgtcctaaagtctcttttgtttgattttagtgtagcccctcctcctctcctttggttattcttttcatggagtatttttttctatcacattcaacctatttgtgtctttgaatctaaagtcttcctagacagcatattgttggatcatgtggctttttaaaaatccatcttgcttgtctctgcctttaaattggagagtttagtccatttgcatttaatgtaactgctgttaaggaaggacttacttttgttattttgctacttgttttctatgtgtgatgtatctttttttgttcctcaactactgccttctgttgtgataaaaagacattttctgtcatacccttttaagacctttttttcttttactgtatatttttgggttattttcttagtggttgccttggggattacatcttcttttgtttggttgggtttgagtttttaaatttgcattttcttgattactaatgaggttgagcaccctctttttgcttttattattatttttaattaacacataactatatatgtttatggggtacagtaactgtatatgtttatggggtacagtgtgatatttcaatacatgtatacaatgtttcatgatcaaatcagggtaattagcatattcatcacctcaaacacttaccatttctttgtgtttggaacttgggttttggaattagacagccctgggatcaaaatctgaccatcatatactggctgagtggatcagactagccactttatctctttgtgcctctgttaccacagctataaaatgagggtagtaatagtcacctgcaaggggtgttttggagattaaatgagatcaagaatttaaagtgtgtagcatgatacttgttacccatttggccctctaccaaatataggcatatggctgcctttacactggttattaaacagataactggagaagcaggtctcctgctcttaagagccactaaagtagtgggagagggaaacatgcaggcaggctcctcatcacccactgggcagacacagctccctgcctccccatactcaatgcttattctcagaatattttactctggtcaataatacaacctagttaatttttcagttctttaaaagatcaaaagcctctggtcctagggtggctactttcaaaatgtgcctctgtgacccatgccagggactgccagcctgcggacatagccatcagctctggagacagtcctatcttgttctccagtgaggagcttggcattatcctcctgcctttaaccagcctgccatggttgaaggctgacagtccctggttcaagtgacctaggaagtgcccactgttctctgctgcccagctggtcagccagcactggtcagggcagcctgggtctgactggcaatgtgagggagggctgcgtggtcacagttttgattctagctctgtgtattttagctttcttactgtctttgtcgagaaaagatttcatccttcttatggctctgtgtctccaggggctttaatccacatccacttagttatctgttgagtgaatgattgtcatctagggcatacttgcaatggtgcctcagttgaaggttggattggaagtggccatgaaaactgagtgatcacttctctccaaatgcaacaatgtgggctgcaggacaggcagtacatcaggcacccagattgtccaggtcaggcaacacctctatccctcaaagccctttgaagtaaaagggtgacctggatgctaaagaaccctggacccctcaccaagctcctggttaagaggagcccatgtccgatctccagggcaggtctggggttggcatggaagctgctgcagtgagaatgttttggggagcacatcctgaaatagcaattggcacagggggtcactgtgactcattagttctcacatttcctctcaagagaaattcaaattggtgacaaaatatgacttcctgaaattaccagtgcttgaaattactttgttcgccgtgtgaaactaaattccttaaaatcgggctgggtgagtgtattttttagttactcttcttgaatcagcctctgcagtcacacttggcttcccatgcctgcttggccactgatgagcttggcttgacccttgatgaatcagttaatctgtccatgtctctttttttctcttctttaaaatggggatacgaacaccatctggcaaggattgttgagatcatcaaaagagagggcctaggccgggcgcagtggctcatgcctgtaatcccagcacattgggaggctgaggcagtgcagatcacctgaggtcaggagtttgagactactctgaccaacatggtgaaaccctgtctctgctaaaaatacaaaaaaactagctggacgcggtgggtgtgcttgtaatcccagctactcaggaggctaaggcaggagaattgcttgaacttgggaggcagaggtgccatgagccaagattgcatcactgcactttagcctgggcaacagagcgagactctgtctccaaaagaagagagaaagagagagaaagagagagaacctgttcaggtcattttctgggaatatgtaggctttacactcctggtctcccatcccaatgttttgggccccatttaagctccatcccaatgttttgcaccccatccagcccaagtccctttccttcaatacatctgttttctcttttggaaattgcaggcattggattagataacttccatgtcatatttcaggtgtaagagaacatgattgggttaaccagaagacagctattattttgagccaactccaagaaagataagttctcatgccacgaggaaagcagcacaggttggagatcagctcagtaagagtgaagtgattccaccacattccaaccctaagggcaagttccagtcctaacaacagttatagcttctctgaaaatcatggtgatcctctagatagggaaacccaagctacagagacgagggaagagcagacggcagacctatgtaaggtggacagtgatgcctggtgaccaccttcctcctctggtgtctgttggcataaagctttttagaaagagtcactccatggaggtctgcagagtcgtgtgcagtacttagattttggggcccaagagacctgagtgtaaatccttcactgccagttcactggctccatgaacttgggccagtctcttgtcttctctgagcctctgcttcctcatatggaaaatagggacaacaatacctacctcatagtgaggtcatagaggaagtcccagatcatgagctcccttcccttgactcatcccttaacagcagggatgaatatttatgttgtttatcaaatcacatttatggaacagagactgtgtgccagggaactcttataagtatcttagctcaaacagctctcagagttagatgtgatcgtgacccccttgtctagctgaggggctggagtcccacagagagtttgggaggggtgatgatttgaattcaggtctgtaaggtgctctaggacttccaccctaatcatgcataaggctgccccattatgctgcgttgcagttcatgaccagctttaaaaacatgtgcttgatatttgcaatacactcaagtgaagagccatgccttccagtgccgttattttgcattttcaccctgaaacacttttcttctgtttaaggatgtctgattctagcaggagctagaccagaccgtgctcacattgcccctttttgcaaaggaagggcctccctgcaacgtgtacacacacacacacacacacacacacacacacacacacacacacacctgctttgctgggctttccttctgggtcaggtcaaactcagaggagggaagatctgaatgtgcctcagcttccatgcttccagggatgatctctgctccacacatatccaaacccagccatcccaggaccctagcaaaggagtgtgtttatatgtgcacaggacttagccctatgacaccattgtcacctagaacagaaagtgcttccccaaatgctcagctcaccaccagcatatctagtcccaagagagacctgggcaaatcaacatccagttctcaaaagcagccatgtcccttctttggtagactgactgtaaaagtctccatgagagacatgtggtcccatcaaccccatttttggcccagcagcgtggatactagcatactatttgaagccttgatattatgctggtttcttacactaaccctatcccacccctaaatcagagccaattataagagagactcacccagggggctttcttgattttgtctttttcttgtcctgattccagaccaggagcccggcatggaaactggagaggtgttgtcaagaaacatgctgagtgtgaattgtgaattctgatgtccccagggtcttaatcttggggacctcatcaggaccaaggacatctacccctcagtgtctttgtgaaaacttgtgaaaaacagatggagcttctagatggtgctgaaatccagtaagctgttaatggtggctgctaggaggtgctacattgatatttgttaagcatttgccttcagaattgaagctctggccactgttccagacccatggcacattcggaacttcctgaatatcctggcagatattcaaccctttccctccatgtgcatttgctaataacaaactctgcatgaagcccaatatccagccctgtggaatgtgccctcgcaggagacagagccgcctgtccccaggacactcatgtggagggtgtggtacgatgggaactagatatttgatatttgtaccaggcatgagctcctaaaaccctgggaatttcctgagtaacagaagtgaggggagcatttttggttattcagagaaagcccctttcaaaggcacctgaggcaaggttaaggaggtgactgtgggagagtgggaactggctgggcatgggggtgaaccagccatgtgattagagggttacaagtttcagccctatccttgacctccaggaaggagagaggaactggagattgagtccaatcaccaatgaccaatgatttgattaatcatgcccacgtaacgaagcctccataaaaacccctaaatgatggggttcagggagcttccgggttggtgaacacatggaggttctgggagcgggttgtgcatgaagagtgcatggaagctccatgcccctccctcttccctggccctacgcatttcctgcagcaggctgtcctgagttgtgttctttgtcattaacctgcaaatgtcagtagtgttttcctgagttttgtgagtcattctagtgaattatcaaacctgaggaggggttgcaggaatctattaatgcatagccaagtaggacggagtgtggatggcctgggcacccattttcatctgaagtcggggaggtcttgtgggacggagccctaaccagtgtggtctgcactagctctggagagctaatgtcagaattgaaatgaattgaattgaattgaactgttggacacccagctggtattggagaatcagagagggcaagacaggtgtccaaggatgtctgtactcactctaggttcaaggcatggtgggcagggcctgtcccattcccatctgggctagcagccaggacagggtttgggagagagccggcgctccacactgagtggggacacagggctgcacagggcaggccactgggaagcttggctcatgcccacagcatcttgctcttctggtcaagttttagtttcgaatttcagtctcctctgatattccaagggctttatgaaagatcccaactgataatgtgaggcatgcattctcagggcccctggatgagggtcactttgggcccggcctctggtgtggctggctgaggtgtgtgggcacttcattcaggccaccaggtgctctattggacaagctatggggtctggtgtgaggctggcttagcccagaggaaggggcatctttgtgatttgtagaaaggtactatctatactttggttccttaccctgcacaagagttgcttgaagtatcagtcccaagtaaaacgtattaacacagtgctctgagactcaaagaaaggagggcaatggccacagctggcatcacagggacagacatctggcctccttctcttccttgcagtgggtgagtgagtctatcttgggagtcctcagggtgtctgactggccaccctctgttcaggatggccctgccttccagttctgcactcacgcagtctcagaaccagccctgatgtggccaggagcatgctgtgcctggtggcaggtctaccattagtgcagatgttacagtccttgttttagcagttaacatttgctgagcatctaccaggcacctaccacacaccaggccccagtatcttgattcacacatatggccacccaaagatgtcttgataattcttattttaagagaaaagtgaggctcagagccagtgtgtgcaaggtcactggctagcagatggctaagtctgctgggttgagtaacaccaggtggctcctgtctgtttccatagcaaggatgtgggcacagatgtccaccatatgctgcttgtatgatggagttgactgcctgttctgttggctctaccctaccaccttgaggctccaaaccactccataggtccagaaatctgctttcaaggcatttgattccgcctggtgactcctgttagcaaatttaaagcatatgaactttttgcaagttatcgagtcatggccttgacaatatagtcaaagtatattaaaccaataggatttcatcacaaaatggacctaaacaccttcccattccccaggtggccccttggagtcatcatctttggtgcacataggacatggggccacagtgacatatcttgcagtaagaggagcaaagcttgccttcccatccatcaacctggggagtctgagctgagagaggccaccaccctcaaggtgcagtggtggccactgctgtgactaagggaagaacacagtgcacaaccctgaccaatgtgtctgctccttggagtttatcttgcagggaaaggtgcattcacagcattatgtgtaacagtaaaaatctagagacacctggaatgggctctgttgtgcttcccagatggcccaggactagctcccagctgctaacacccagccctttcagcctttgcctccactgggaatttctcagagacacactaccttcctaggggcagccaccaccaatggctggtcattatgggggcatagaggcctggtcttcttgccccaacttaggacagcctggaaagcccagctaaccctcagagctaagtatggagtctactgaggctgctgttgtgcctgcattgcagtctgattttgccttttgctcagtcctgcttcctgccctctccatgggtgtcaatcccaaggttttctagattttttcctgttttcttctagaaacttcatattttgtatttttgtatttaggtctaccatccattttgagttgatttttgtaaaaagtgtaaggcctatcctttctccattgaattaccttggctctcatcaaaggtcagttagctacatttgtgtgggtctatttctatttctctatttgattccattcatccacgtgtctatcattttgctcatatcaccatgttttgtttacatgtttattttagagtaagtcttgaatttaggttgcatgcttccttcatttctgtgttggttattctagatgttttgcctttccatataaattttagaatcagtgtgccaatacctataaaatagcttgctaggattttgattgagaattcactgaatctatatagatcaatttgggaacaattgacatttaaataatatggagtcttccaatccgcaaacacagaacagctctccatttatttcaatctctgatttttttccatcaatgttttgtggttttctgcaatagatcctatgcctgttttgttaattttataactaaatatttcattcttttggtgctattttaaatgacagatttgaaaaaaattaatttcaactttcaattgttcattgctggtgtatggaaaagcaaaaaatagcttgctaggagtttgattgggattgtactgagtctatataccaagttagaaagaagtgacttttttttcttttttcagacggagtcttgctctgtcaccaggctggagtgcagtggcgctatctcagctcactgcaacctccacctccctggttcaagtgattctcctgcctcagcctcctgactagctgggactacaggcccccgccacctcgctcggctaatttttgtatttttaatagagatggggtttcaccatgttggccgggatgttctcgatctcttgacttggtgatccacccacctcagcctcccaaagcgctgggattacaggaatgagccaccacgcccagcccagaaatgacatcttaacaatattgagtcttctaatccatgacagcggaacatctctccatttatttcgattttcttagatttcattaatcaagagttttatacttttctgcataaagattatgtacatattctgttagatttataggtatttcatttttatgctaatgtaaatggtatcgtgcttttattttcaaattccagctgttcattgttgatataaaaaaggcattgacttttggatattaaccttatatcctgtgacttgctataatcacttataagttgcaagagttttttccatcaattttatggaattttctgcatagacaatcctgtcttctgtgaaaaaaggcaattttatttcttcctccattctgtatatatatggcttccttctcttgtcttactgcatttgctaggacttccagtacaatgttgaataagtgtggtgaattgccttgttcccaacatagtgggagaacatctagtttctcacaattaagtatacattttgctgtagggtttttgtggatgtcctttatcaagttgaggaagttacctctaattctagtttgctaaaagtttttatcatgaatgagtgttggattttgtcaaatgttttttctgcattaattcatatgatcatatgatttttcttctttagcctgttgatgtggtgggttaccacattgtttatcacatattaactaccacataatagttttttgagtgttcaatcagccttccatatctggaataaactccacttggttgtggtatataattctttttatacattattggattcaatttgctaatatttcattaaggacttgtttacatctatattcataaaagatactgatgtgtagcttttctttcttgtctttatctggtttgggtattagggtgctgttagcctcacagaatgagttagaaactgttacctccatttttatattctggaagatactgtagagaatttatctaatttcttccttaagtgtttggtagaatacaccagtgaaaccatttgagaactagtgcttactttgttggaaaattgtcatttatttaacttctttaatagttataagccaattaaaatgatatatttctccttgggatatcaattatacttcttaaaaatattttcttgttgcagtagattttgcaatatatatttacagctaatctgagtccactctcaaataacactactacttaaaaaatagtacaggttccttatatcagtattcccagttcctccatcctgttccttataatattactgacattcactttggttatctacgtgttataatcaccctacatattgttgctattgttacttggacaaacagttacctgttagatccattaagcatgagaaaaatgaagactttgttttactttcatttattccttctctgatgctctttctttatgtagatctgagtttctcacccatcattttctttctctcttttaacatttcttgtaggacaagcaatgaatactcttggtttttgtttgtctgggaaagtctttatttagtctcacttttttttacaatgaaaattatttttctatttcaatacttttggggtacaggtggttttggttacatggatgaattctatagtggggaattctgagatttcagtgcacctgtcactcgagcagtgtacactgtacccaatatgtagtctttggtccctcaacctcctcccaaccttccccacgagtcctcaaagtccattatataattcttacgcctttgcatcctcataacttagctcccacttacaagtgagaacatatgatatttgcttttccattcctgagttacttcacttagaataatggcctccagctccatccaagttgctgcaaaagacattatttcattcctttctattagccttcacttttgaagaaaaattccagtagttatgcaatcctatgttggtagggagttttattgcagcagttttaatgtacaaactattcaacatatttttttttcaacagttgaaatatttcccttcactctccacttgcttgcatgacttctgttgtgaagtctgatataattcctatccttgttcttctaaaggaaaggtgatccccatacccctggcttctttcaagattttctctgtcttttgttttctgcattttgaatgtgagacacctaagatgtgtatattttttgtttttatcctgcttaggtctgtggtttgttttctgtcactgcctggagttggccaactccaagtttagagtgcacacaggtcttcacaagaccagcctcacttccaacaccaactgcaaattggggggtgttcccaaaaccacccaggctaggagctgtgccgtctttaatatttgctgtgtctgcagatgccagagcgaaatcattgattttaagtttgcacagattttaccttgttgtaaggatgagagtgaaaatgtctaagcttttcacatgtcaaagatgaaaccagaagccagagtctttccattttcatcactactgcacaacgctgactattcttttccttcatctacccctggaagatcctgagtcacctgccagaggacatcacctgccacacggaggacatcagtggacagttccctcaggcctttccattggatgatatgagaagagcatgagctccagaaggtaagagtttttgccaattatgttgcctgctgtattccagtgcctagagcagtgcctggcacaactcatgtttgctgggtgactgaataaattatcaacccttaggaaacttttgagatcatttcccaggcctgtccacctttaatggccccagtcagctctcatttctgcagacaatctaccttcctctgagactcccaggtctgaggtttgcagtgactgcatgctggagaagtaaaactgggagaaagctccaaatgtagggttcctgtgtccagagtctccatcatatcacttggttttcaaaaaattcccaaaggaaacaattctcagccagagattaacagtggcatctgattgtttgtctggaagggagttcccacttattcagggtttaccctgtgcctttccttgaactcttttcttttaattagacatgtaatccttattacagtcttgtgagatatggcctattgtggtctcacttttacaatgaggaaatgaagcagagagattatatcacttgagtaagggcatagagtaagcaggtggtagaacctggatccacacccaggcctggctttctctagactgtttttacattttgtgggaaaatgatgccagcagcagggagggagggctggctttccctgtggactttccacaagaaaatccctgttgacatccatctgcagaaggagatgggcaggttaatagagacaggatcattccacggggctaagaggaggagggagcagagggctgggcatgggaggagggagagcctttcctaactgaatgctgggccaagctggctgcgggatgccctgactcctggaaatctctggggcaggtgtctgagagttgacaccatgggcatctatgccctatgttctccctcaccttcttcctggccaccaggatgctgcttcctcccacgcttgtttctatgataactggcaggaagtgttatctgctagccagctcacctgttgagagaagccagtttgcactagtagctcagtagtatcatgggtagctgaatgggtactttcagatttgggtggcggatttgatgggagcagccaaaaggtgccatcaatgtccctaaaagcagaggtactgctgtgagtgagcactaaagatgggtcagctcagatctgggttgagtcctgtctgccactaactagctgtgagcttttggcaagtcagtaaacttcagatcttctgcttcctcatctagccaacagggaaaagtgctctgcccccacagagctgggccataggagaggataagctgctgggtgcagagggcggtgagcctgcactgtggtttgcccatttcacaaccattcccagagtcaaatcatttctcccagatgtgcagaaacagaaaccattgtaggaaactgggtctctaagaagagccgctgactcagcccttatttggttctgtggctgggggtgggtgagcctgggcttccgcttggctccctagagggtagtgtggctggcagggcatctgtctagacactctctgaggctctgcccagcctgttctttggaatagactctcctctgcttctcagggctgacagctctgagcccaggaaagcaagagggctgaattgtgtcccccgactccagttcatgatgaagcctaacccccaccgccccatacagaaagtggctgtatttggagatagggcctttaaatatcaaagttaaaatgagtgattaagttaaaatgaggtcattagggtgggccctagtccaatatgactagagttcttataagcagaggagataaggacacagataccaactgtgtgaagacacaggaagaaggtgatatttacaagccaaggagagaggagaaagaagcttgctaacacattgatcttagacttccagcctccagaatgggaaaaaatacatgtatgttgtgaaagccctggggcccgaggtgctttgtcatggcagcccgagcagactcatgtacctgccctccctcttcctcagtgtgaacaagggaattccagcacccatgggaggctcttggaggctaggctccttctgggtccaccgtgaatgaagcacttcaccttgtttctgggcctctgtctcttgttgcccccacccccacttctgcactgggcctggtgtttccctggaccccgactccctgtctcctcaggcatgactagtttcatactcctccaaggttggtaagagaaaaatgcctggggtttaggttatagcttgaagcacagctttgggtgctccgtaacttgtcccagccccttggccagctccaagttcagccacagctgtggtgaaacgtcccctcttaggtgagcccactgatggcttcccgctccaggctctcagccctcggctttctctgaagccacagggaccctaagccctgggcaaacaaatgcagtccagaagggctgggtgtccacacccctggggttgccctcagccaagggagaaagggggccgggtaacccccaccctctccccttccaggcttatggcaggtgagtctgcactcttcccagagtccctgtggaagtgagtcttgggacagcagcaaccttcattatgcccctcacactggccttccctccttcctggtgtcactctttgccccatcagtcctgcttcctggcatcacctcccaaataaaccacctgcacccaagcccttgtcttaggctctgctattggacaacataaacttagactacttcctggctggggaagcaggatggaaggactgcacttttgagcttcagttttctcctctgtaaaatgggaacattaatatcttgcaagctggctacaggaattaaatgacatcacccctgtggatattgaagagagttgtaaaccgtgcaaggtgatctcaatgttgttatttattattatttttagtttggtggtagcatcaggtccttactctctctctcttttcattaaagaaagaagaaggaaaatctccatcttcagactcatttcccaggggtcctgtgctgccaggtgcaggtgaacatcctggagaggcttgggggttaaggggttaatgacatggctgctccttcttcctctgccctgcacagcttcagcatttctctggtggctgtcgataaaggcatgttagctgtggggacactgcatgaaggagacattcagggtgtctgggtctttccagcccagccctgcatccatgctgtctgtgtgcctgtgtcccatgcttggtgcttgtgcagggagactggggtgagcaggatggaggccttagagcttgtggtatggccctggtcctcttccaggaatgtctgcttgagtctgcccactgggctgctcctgcccaggctccaagagccaacagggattctccctgctctgagaccctgccctgaatccatgggttgcatcggggtcctcctgtttcttgctgctccttgtaccacctgcaccacagccctgcccttttgcagaccacgatctcctagagaggaggggatatatctttacacgtgttatgtgtgtccaagctttagagccatgactgctggcaaacagtaccagctcaagacccatggctatagtcatcgctagtaggacagtgggagaccagtgaggagttctcacctgaggtcaccacaaagaggccacgaagtgggcaggcaaagcccagaccttgagtggcatgcaaaacccagagtgctgggagggaagtcagaagggacaggacaaagggttcaggaagcagagccactcatagaatcaggatatgaaagtaaaaggtaacaagttggaatagtacattggggtgggcagaagacatatcagggagggccggagtctgagaggctttctcatgatggccaggactttagcttcattctgagagctccagcgtgaagggccagaatgggtggttaggacaatcagaaaagctgcctgcatacacattgctgccatccctgccaggccagtctctgagaagctgatctccccagaagccaaccaggcctctagatgaatgccactgagagtttactgccctgggcatccatatttctgaagctgcagatggagacaggctccaactattgtgtcgaggtggggggcaaggggtagaaaggagccatgaattattgcttgtgtgaggccacacaataggtgtcattcatcactcacagagctgttgtccagagatggccgacaggggacacaggtatacagatggatggatggatggtgaatgaatgagtggcagatgagtagccaatggatgaatggtgaatgagtgggtggatgggtgggtggatggacgggtgggtgaatgggtggatttgtaggtagatggatagatggtagatgggtgggtagatggatggatggtaaagaaatgagtggatgaatgactggtggatgtataaatggatggatggatgggtaaatggatggatggatgggtagatggatggataaatggtggatgggtgggtgaatggatggatggcaaatgggtgaatagatggatggatagatggatagatggatggtggatgagtggatgggtggatggatgaattgtggatgaatgggtgaatggatggtgctgggatcagtgagacgggatgaaaagaaggcagaacctgctggaagggtcagtaagaaaaggcacaaagtatcctcacttcacctaccccttcacctacattcccctcccaacaaggatgtctccatcctcctcgctgctaaagccagtaggctggcatcaacttaccttctttctcccccttttccacatgctgccagccacttgtgcattccatcttcttagactcttatgtttctaccaccactttttggcctatattctcataagctctcccttggactgcttaagtagtctcctgcctagtagctctccctgctctggtctcttctccctctgcccatccactacccctcctagagccattcccttagaatcttagaatggcttccaatcttccaccgttttcccctaacagaaactacagaatgaggtctggtagctgcttcgtaatgcaacttggctaggctgagttacacttcccaggattcccttttgtgtatctttcctataagtctgtgccacggggagattcttggggggatttgggagacatacattgctgctgatcagtggaatcacctcatcagtgtgaagcagcagctgggcctgccattgttccaccttcccatgaagccttgggcagcttcttcaactcgcgggccaggagtgtgtgtgttgtgtgtgtgtgtgtatgtttagcttaatgatgaagggccctggcttctgcaggattaccttgtaccactaaaactaatcatctcattacccagctagaaaccccagacacctgagtgcctcccctgcccagtactgtcaagtgttgtccatttttcttcccagtatctcttgaacctcattttccctctacattcttacttactcaagccctcaggaaggtcacctgaccaccattagtcccatctccatgctatttattcattcattcaacaaacaagtattaaacatatattatgtgccaggcataattctaggcaccgtgcaaagagctctatctttaaacttccccttcccctcctaattctagtggtgcttaatgaacaaagggataatggcaataatgcctgcaagatcgtgcctatatcctaataagaaagcggatatgggaaacttgaaaaaaagaagtaaaaggcaggacttccagctatggctaaatgatgaagtcagcaaattctctcccaaaaacacaatcataaatcttgaaaaaactgacataaacaaccatttctgtactctggaaattgaccaaagacatgcaacaatcagaaaagtagttatgcttgaaaaacttctaaactttgagtaagaacagaatgagtctgctttgcactgttgtactgtttgttagggcaattcccatcccacttctctaagctcagtcctcacacaggttctgtcagggtggggcattgtcatggggagcagcaattttgcgcatgcagtccaaagttgcttattcaattatgattgtcagtactactgacaatactggcagctagtgaatggggaggaccaatgctcaattagtctgaggttgcagtcaaggttggggcaaatatattcctggcttggactgtatgcatgtgcagtggagaccaaagatagctcaaagtatccacacattcttgccaactctaagactgagggcatgtgcagaggttatatgaaaggtccaacagaaagtaaaagccaaggcagtcttgaaaacaacctgaactttgagagtatttccctacccatgcacagatctatgggcagagaatagagggcttacgggctcatggtttgtatatgacatctgtctcatcactggctgattactaaattacacagaaacaagagtgacccctaggaaggcaggtttaaaggtacgagcaagagtaaaggcaaatataacagatattagtggctatgttctgtgagggagacagatttcacagatttaggctaggcaagttattaaacaaatgaacaatttaacaacaacattaatcatgtgagaaaatcagaattcagcgttcttaaaatatgttatctaaaatgcccactttctaacaaccaaaaaacaaaagggaagtacaaaggaaaagtgtgactcatatgtaaaaaaaaaagtcaattgaaactgtctctttgagtattgccagattttggatttaacagagactttcaaaatagctattgtaaatatgtttacaaaaacttaaagaaacatgattgaagaattacagggacataggacaataataaatcaataaatagagaatttcaatgagatagaaaatatttaaaaccaaatggaaatgcttgagttgaacattcaataactaaaataaaaatttgctggaggagctcagcagaagatttgaggaaggagaataaagaacaggtgaatgtaaagacagagttatcgaaattagcgaacctgaagaacacaaaacaattttaaaaattgaagcacaaagaaaagactttcagagacctgtaaagcaacataaagcatgccaacatatgtgtaatgcaagtcccagacaggaggagacaaaaaagaaaaagacaggaaaactatttgaaaaagataattactgacaacttcctaaatttgatgaaaaacattatttttcatgtataattatctcaaagaatcccaagtaggataaatacaaagagatctatacctcagcacattagagacaaactcttgaaagtcaaagagaaaatcttgaagtagcaaaagaaaaatgtcttgtcacatgaaagggagtactgatgcaattaacagttgccttgtcatctgaaacagtgagggctagaagtgggaggacgtattcaaagtgttgaaagaaaaatacaaactgttaattaagaattctatatcaaaaaatatatccttcaaaatgaaggcaaaataaagatatttccagaaaaacaaagactgatagaattccttgctagctgatctatgttataagacattaaaggaaattttttaagctgaaaggaatttcactatgcagtaacttgaatctgtaggaataaatgaaaaacacaggaaatggtaaacatgtgggttaatatgaaggtcccataaatttatttttcctcttaacatcttttaaagacatagtatgtataaagctatagttataacagtgtatttttgggcttatcatgtataaataaggattataaatgttatatatgataagcccaaaacaatagtagcacaaaggaaaatggataaaatgaagctgtcttggagcaaaagtttgtgcattttactggaattattaatctgaagtagattaaggtaaaatgcatattgtaatctctagagcaaacactaagacaacacaaaaaatacagtaaaaaatagaaaaattaaaatggtatactagaaaatatctatctaacacaaaagagggtaaaagaaaaacaggaacaaaaaagagaagacatacataaaacaaattataaaatggcaaatgtaaattcaaacatatcaataattatattaaatgtgaatggtctaaatacctcaatcaaaatacaaagactctccataaaatagcaagatccattagtatgctgtctaaaagagacacattacagattcaaagacacaaactggttaaaagaaaaagaatggaaaaatatatgccacacgcttcatccctgggatgcaaggctggttcaacatacgcaaatcaataaatgtaatccagcatataaacagaaccaaagacaaaaaccacatgatatctcaatagacgcagaaaaggcctttgacaaaattcaacagcccttcatactaaaaactctcaataaattaagtattgatgggacgtatctcaaaataataagagctatttatgacaaacccacagccaatatcatactgaatgggcaaaaactggaagcattccctttgaaaactggcacaagacagggatgccctctctcaccactcctattcaacatagtgttggaagttctggtcagggcaatcaggcaggagaaagaaataaaaggtattcaattaggaaatgaggaagtcaaattgtccctgtttgcagatgacatgattgtatatttagaaaaccccattctctcagcccaaaatctccttaagcaacctcagcaaagtctcaggatacaaaatcaatgtgcaaaaatcacaagcattcctatacaccaataatagacaaacagagagccaaatcttgagtgaactcccattcacaattccttcaaagagaataaaatacctaggaatccagcttacaagggatgtgaaggtcctcttcaaggagtactacaaatcactgctcaacgaaataaaagagaacacaaacaaatggaagaacattccatactcatggataggaagaatcaatatcatgaaaatggccatactgcccaaggtaatttatagattcaatgccatccccatcaagctaccaatgactttcttcacagaactggaaaaaactactttaaagttcatatggaaacaaaaaagagcccgcattgccaagacaatcctaagcaaaaagaacaaagctggaggcatcacgctacctgacttcaaactatactacaaggctacagtaaccaaaacagcatggtactggtaccgaaacagagatatagaccaatggaacagaacagagccctcagaaataacaccacacatctacaaccatctgatctttgacaaacctgagaaaaacaagcaatggggaaaggattccctatttaataaatggtgctgggaaaactggctagccatatgtagaaagctgaaactggatcccttccttacaccttatataaaaattaattcaagatgggttaaagacttaaatgttagacctaaaaccataaaaaccctagaagaaaacctaggcaataccattcaggacataggcatgggcaaggacttcatgtctaaaacaccaaaagcaatggcaacaaaagccaaaattgacaaatgggatctaattaaactaaagagctcctgcacagcaaaagaaactaccgtcagaatgaacaggcaacctacagaatgggagaaaatttttacaatctactcatctgacaaagggctaatatccagaatctacaaagaactcaaacaaacttacaagaaaaaaacaaacaactccatcaaaaagtgggcaaaggatatgaacagacttttctcaaaagaagacatttatgcagccaacagacacatgaaaaaatgcttatcatcactggccatcagagaaatgcaaatcaaaaccacaatgagataccatctcacaccagttagaatggcaatcattaaaaagtcaagaaacaacaggtgctggagaggatgtggagaaataggaacacttttacactgttggtgggactgtaaactagttcgaccattgtggaagacagtgtggcaattcctcaaggatctacaactagaaatatcatttgacccagccatcccattactgggtatatacccaaaggattataaatcatgctgttataaagacacatgcacacgccgcaataaacacgcatgtttattgcggcactattcacaatagcaaagacttggaaccaacccaaatgctcatcaatgatagactggattaagaaaatgtggcatgtataaaccatggaatactatgcagccataaaaaaggatgagttcatgtcctttgtagggacatggatgaaactggaaaccatcattctcagcaaactattgcaagcacaaaaaaccaaacatcgcatgttctcactcataggtcggaattgaacaatgagaacatttggacacacgaaggggaacatcacacaccagggcctgtcatgggttggtgggaggggggagggagagcattaggagatatacctaatgtaaatgacgagttaatgggtgcagcacaccaacatggcacatgtatacatatgtaacaaacctgcatgttatgcacatgtacctagaacttaaagtataattaaaaaaaaaaaaatatatatatatatatatgccacacaacagtaaacataagacagctggaactggtcatgttaatatatgataaaatagacattaagaaaagaaacattctgggccaggcgtggtggctcacgcctgtaatcccagcacttggggaggccaaggcaggcaaatcacctgaggtggggagtttgagaccagcctaaacgacatggagaaactccatctctactaaaaatacaaaattagctgggcgtggtggcacatgcctgtaatcccagctacgtgggaggctgaggcaggagaatcgcttgaacctgggaggcagaggttgcggtgagccgagatcgtgccattgcactccagcctgggcaacaatagcaaaactctatctcaaaaaaagaaagaaagaaagaaaaagaaacattctgaaaaagaggaatatttaacaatgaaaaacagtaatggtattaggaagctgtaacaattataaatgtatggagataacatgagagccccaaaatgcatgaagcaaaaacagacggtattgaagaagaaacagaggactaattaattagagttggagatttccatatcccaatctccataattgatagaacaactagacagaatatcagcaactatatagaagtcttgaacaacagtatcaactaatttgacccaatcaacatacatagggcactcctaacaatgactgcagaatatacattattttcaagtacatttagaatattctctaggagagacctatggtaggccataaaacaagtcctgatcaattaaaaaatctaaatcatataaagtacattatctatcttggaattaaattagaaataacaacagaaagcgattttggaaaccctcaaatatttggaagttgaacaacacactactaaatcagccacacatcacacaggaaatcagaagggaagttggaacatattttgaatggaatgaaaatgaaaaataatatgccaatatttatggtatacagcaaaatcactatagggaaatctatagctttaaatgcgtatatcagaatataagggctcaaatcaataagctaagctttcatgttaagaaactagaaaaattagaaactaaatctaaatcaagcagaaaaagaaagaataaagagaaataaaataaagaaataaaaaaatcaatgaactagaaaacagtaaaacattagagaaaatccatgaaacaaaaagctagcttgttgaaaagattaataaaatggaaaagcctttatctggactgacaaagaataaaaaatcagtaatgaaaaaggggacataatatcaactcaactgaaattaaaaagacttatcaaagaatactatgaacaaccttacgccaacaaagacagaaataatcatacatatacatgcacgtgcccccacctcccgccacagacgtataaataggtataacaccaatacttcacaacatttttcagaaaatgagagaacacttcccaactcattctatgaggccagtattaccttgatattaaagctagatgaagaccttctacaaaaagaaaactaccaggctaatatccctcattaacatacataaaaatgctcaacaaaatattagcaaagtaaattcagcaagatataaaaaggattatacaccatgaatcaatgggatttatcccaggaatgtaacattagtttgacacctgaaaaaatcaattaatgttgtacatctattacacatctatatattttattaatagaaatagaataaaggacaaaacccatataatcatctaatggatgcagaaaagcatctgacaaaatccaatagccattcatgattttaaaaaacaacaactctcaacaaactaggagtagaagggaaattaatgtgttaaagggtatctatgacaaacccagagaccaatatcatatgtaaccatgaaaatactgaatgctttccccttaaaataaggacaaaggcagaggtagccactttctccacttctagtcaacaatatactgtattattctatccagtacaatagacagtgagagacaaagggaaaaaagagggtcgggagagggaaggaggggaagagaggcagagaaaaatttaaagccagattggaaaggaagaagaaaatctgtctttatttgcagatgatatgatactgtgtttggaaaattatcacaagaactaatttaaaaatctgctagaactaataagtttttcaaagttgcagaatacaagatggacatagcaaaaatcaattgtatacctacacatcagcaacaaaaactccataaatgaaattaagaaaacaacaccattcacaataatatcaaaaagaataaactatttagaaataaatttaacaatgatgtgaagacatgcagaaaacacttctgagagaagattaagaagatataaataattagaagtacatttctttctcatgaagttaaagaatcaatattgtcaggatggcaattatcttccaatgaatctacaaattcaatgtgattcctatcaaaatctcagaaacattttatggggtggagaaattggcatgctaatttgaaattttatataaaaacacaaagggcctagaataggcaaaataattttgtaaaagaataaagttacacactacctatttttacattttctccaaagttatagtaatcaagatagtatggtataggcacaaggataggtctacaggtcaatagaatataattgagaatccagaagtaaaccccaatatttgtggctagctgatagttcacaaaggagcttgggcaattcagtggggaaaggaaaattttttaacaaatggtgttgggacaattggctatccataagcgaaacagcagcagcaacaacaacaacaacaacaaaaacccttcaaacaaacaagcaacaaaacaaccctttgactgtacctcatactatatacaaaaattaactcaaaattggtcttagctctaaatgtagatgctaaaaccatacaacttctagaaacaaacacaggagaaagtgtttgtgatgttgggttaggtggactcttagataccatatcaaaagcatgattcataaaagaaaagatagaaaaactgaacttcgacaaaattaagattttttgcactttaaaatttaagtacaccattaagaaaattaaaagtcaagccacagactaggagaaaatttaggcaaattatatatctgataatagatttgtatctagaacatgtaaacattcttaccactctaataagacagacaacctgatttaaaaatgggcaaaaaatttaaataggcatgttaccaaagaagacatacaaacaggctgggcttggtggtttacacttgtaatcccaacactttcgcaggctgagaggggtggatcacctaaagtcaggagtttgagaccagcctggccaacatggtgaaaccctgtctctactaaaaagacaataactagctgtgcgtggtggtgggtgcctgtaatcccagctactcaggaggctgaggcaggagaatcgcttgaaccgggaggcagaggttgcaatgagccgagatcacgccattgcactccagtctgggcgacaagagcaaaactcagtatcaaaaaatataaaaatggaaataaaaaggcatatgaatagttaataagcacaggaaagtacattcaacatcattaatggttaagcaaatgcaaatcaaatccccaataaaataccactttacacccgctaggatagctataataaaacaatagcaagtgttggtgaggatgtggaaacattgggacccttatgtatgaggtgggattgtatgacggtgggaatgtaaaatggtacagagatttcagaaaacattttgacagtttcttaaaaattaaaaaataaacctaccatacgacccagcaagagaaatgaaagccgtgtgttcacagaagcatatgcatgtgaatgctcataacagcatcattcgtaataatcccaatccaaaaacaacccaaaagtccatcaacgggtgagcggagaaacacaatgtgcatccctacaagggagtattactcagctacaaaggagcacactgatcactgattcacacgagaacatgaatgaccctcaaaacgttatgctacatgaaagaagcccaatgcaaaacactacacagtttatgcttccgtttatagaaaatgtccagaaaaggcacatttatgaagacaaaaagcagatcaatggtttccttaggttggggttgggaggaagggttagttgcagatgggcttgagggaattttttgaggtgccggaaatgccctaaaactggattgtgatgatggttttacaactccatgaatgtagttaaaataatttagctgtgaacctcgaatgggtgaattttattgcatgtaacttacatatcaataaggctgttgaaatacatagaatatgataataaccaatgccatgaagaaaaaaagatgggaaaggagtatgggaaggcagggcagggtttcaattactgcagtcattaaaatctccaggcccccaggatgtggtgggactgcacttcctgggccccttgcagttgattggggcagtgattagtgtgggacagagttgtgagcagagtgtgatgtgtgtcccttcccggctgaggatttaactgctgacgtgagaccattcacaagctcactgtttctcgggcctctggtctggcagcatcagcctgggtctttaagtcactatgattaacagggcaggatccacccctcaactcacccaggtgacccggtggttgtgtaactcatcccattcagactcacacaggtggtcagagaaagccttaataaaagctttgggtaaaagtctgaaagaggtgagtctgtaggccaggcagctgtcctggggggaaaatggtccggagagtgggcagatcatgcaaacatcagagcagcagggaggccggcactgctggtgcagagcaggcgcagcggggtgggggagcgtggggtgcttggcagcagatcctacgatgggcaaggcgggtgccagaggagggcaggcagccgacagaggtaagtggcctgggcatccatatggatgtgttgagcaacatggatgcccatggatgtgacagtgctgattggatttaggttgaaagagtcttgctctgtgcagtatggagagatggaagggccaagggtgggaagaagaagagcaatggggaggatcctttgcaaagatccaggtgagagccgacctctcgccccgctgccatgcaattattcctatgaacattctcatcagatcagtcctgtgcttataaccatcaatagctccctatgcctcacgagaacaagtccaagtttctgaatatggcatccacctaccattcctcccttattaccccattccaactgcttcagcgcccctctctctaagtcccctattctctcaggacacagtcatgcccccctacctgggttctcacaatccccttacatctctgccagcagtgggggagagagtctgctctgggaaaggccaaggtgaggacaaccacagagtcagggaggcgtgggagagggtttcgaaggagcctccctaccccaggctgctcccagccttggtcccagcgtgcaggtcagggatttggggacttgaaggagtggttggattcagagatgccttctccttctctttggacactctggctgggtatgggcagaggccaccgtctttctctccactgtgatcccgaggcacagtggcttcttggcatggggagtgccaggagggtcagacagggagaagccagcagtcttgggagacaaccaggcagaccagtggtctgaagtttgggagctggtgagaaaagaggctgcagctagtcctgctggcaggagagttccctaggaggagctgaggcccacagtgatggagctgagggtgctgcccactgctgggtgagacttttagcacagaactcaccaagtgagaggccaagaggctcaccaccagctcctgctggagggaaagtgctggtaggttctcgatgtggcaagattgtggacaaagtgaagaaatgaagcatagcagtacaattgaacgcataaggacctttcatttgccctcaatccttgaaaatgacagttaaaagcaaacttaagtttctcaataatctccattagctgagaaagacggagggagggagggagggagagagagagaaagagagagagagagggagagagagagagagaccaggaggtggcaggtggagagaagaaagataaacacacagaggtgctaaccgagagaccaaggatggggaggggaagccccctccccctgtgctggagactcttttttttttttttttttttttctgcagcctttcacgaaatggcattgccagtccatttttagagttgtcaaagtgtttgagattaggtaatcatttacaaattaatccagtctcaaaaggaatgaatgtggatgaaacttggaaaaattatgctaagtgaaagaagccagacacgaggcttcataaaaggatacatattgcatgagtccatttacatgacaaatccagagttggaaaatccatggaggcagaacacagattgatgtttgcatggggtggagaagagggagcaacctcttaataggtacaaggtgatggaaaaattttggaattaaatggagctggtggttgcacaacatcatgaatgtatgaattgccactgacttttacacttcaaaatggttaaattcatgttatatacatttcatcttgataaagacattaattcaatcaaattcattaagttcaggtatgtcatgcagtatgtcctctgtccctttctcaaaggatttgcacctatgctatgaatctggggaagaatttatttcatcatagaaatctggtggctggaacctcctacaaaagcaagtgactgttccttccaagccagataatgcaataaacctagcacagggaaaataatacctggagatattaggtattaggcttgaacagttaaaggttaatctcagctgctcccccaccccctattttctcctgtggaaagtgagatccagggaagttgacagtgtgagaagtgtctgcagcacgaggccggcccaggggtcctggcttctagcccactccgttcttcatgaacacagagctttactcctcaccccatgaatatctactcagaccacagaaaaggggctctgtggagtctgagcccaccctgggcttggtccactatatcctgaacctggtagcatattacattacatcacatcacctgggactttaaaaatatgctgatatcttggattcatccaagaccaattaaacctgcatctctggagggggagcctgggaatttttaaaagcaccttgggtgattttaatgtggaggttgaggtccatgactgcatttcacccactagcttctagaatttccaatctttaccagtcctggaggggctcaggcaacatcatctcataactgagcccatcaggtcatgcatatgacctgactagcaactgccaaccatcacctacacagcccatgcagcccagcacctgcacaacccatccaatcatcacctgcatagtccacccagccagcacctgcacaatccacccagtcagcacctgcacaacaagccgaatcctcacctgcacagctcacccagtcagcacctgcacaatccacccaatcatcacctgcatagtctacccagccagcacctgcacaacccacccaatcagcacctgtacaacccatccaaatcatcacttacacagcccacccaaccatcacctgcacaatccacccaatcctcacctgcacagcccacccagcgagcacctgcctgtgacccaaacaaacagtcatcccacttggtctaacaattatctcccaggcactttactgagggacccaaacagacagtcacagccatcccatttggtctaatagttacctcccagacactttagtgagggttactgagatgtcctcactatttctctactagccccttggctggatcctttccaagcagagatgcagagtagccttcagctgcacacagcgttcccctgtgaaggacttgcctactgccccagcggtccttggacataggagtccttacagactctgaatgcaatcagagccctgagtcattagagcccaggaccctgaagtctctgtttttcaggcagacacagagcagctgccatagttcaggggtggggtttgtgccatcagccatttccaggagctgaaggaggtcagaaccctgaccacagatgccgcctggtgctctcagccacaagaccaagacagcctccggggaccccatccctcaagcaagaagtcaaatgcaaaggtaatcatttcccacatagaacataaaaaaattcttactgaaatatctggctgcaaacgtcctccttttgctggaagctgtcggcagcataatgaagctggcagtctgtgcaaatttcttctgtatcctttttataaagaaccaaccacatcctcaagcagacaagctaattcctgttttccagtaacaggagatccacatctatagaaaagaaatatatttagaatgccctttatctggtattttcttggattttaagcaagaagcctcgctgtgaagaattagttcattaagcgtaagtgcatctagggatcttggaatggccttgagaaagtcacggggtcttggggtatcagttcctcaaatctgtaaaatgggaacaatagtgacaaccacttcacagaacaaagaattgagaagtggaaagaaggggctttgtgagcaaagccctcagcacacatcggatgctatatttgattttttttccatgagctgacctggattcaaggggagctgggtttccagaaagccttagaaataagtacaaacaacactgcaaatttgcagtgacttccaggatgcatttatggcctttgtctggtgggcacagcagtcctgttagtggggagagcaagtcccacagagggacagtcaaggcccaggagcaccccatgtgagaccctcaccaggcacacaggctgctcatggcatggcttctccattccatttctggaaatttagcatcattacagcataatttacagttgtggagaatcaaaaagaaaaatcccaattatgaaacagccaagcgatatttatgcagccatcagcatcattgacatagtggtcctggcagtccaaggcaaaggcaggctccaaggcggtggatacaatgttatctaaatgagggcagcattgattcagatggagcagtgactcctgggagggcatgcatcaggattttcttcctagcaccctccttgtctcctctgttctattgagcttgcatcacatttattgatagtgacctgaaacacctttcaattgcagagagcataaaagcagttaaaaaccaatcactgctataaagataaaacaagcatagccagtgctcagtggctcagtgcaggctagatccttcctacacctgggcttgtgggtgcaggaattggggctgtcaccactgcaggaaggtgcaccctgggctgcgggacagcgcttagtggggtgtgttgggggaatgtcatcttggcccatgccttggggatctgtggacagttcctgctgctaatgttctcagaagggagcgctggaacagcacagagaacggggccaaactgagcctctggggagtgaccagggatagctggaagcagaaggaggcagcaggcgagcactcaactgcttgaagagagcagcaagggccaaaacccaaggtgccagcatgtccttgcaacaaagcaagcagtaatttgggttgcaaaggccagagtgcaaggctgataagagcccacaggtacagaggcagagaggagtgagaggaagcagcccatcccacgacctggtgtacagggggctttggaactaaaactctaggacaaagtccaggttttccattttcgagtgcttggaatttagacatgggctagatttggcaaataaaggtgtaggatgcccagttagttttgcagtgtaactgtgttctaaatattgcgtgggacataatacctgctaaaaaggtatgtatagttgacctgaaacactattcagatttaactgggtatcctgtattttatctggcaaacgtataccttctgaatatccattttctctttgatcaaaaaagaaaataccaccaggtaagaaactttcaattgcagacaataagaaagtcagttaaaaagaggggatttattggctccttgagcaggaaagccctcataatatggacttcaggcatggctggatccagcagcttgacaatgttaaccaagtctgggtttttttttccagttctcctgtttgcttctggaatgcctgcttcattctcaacaaagtcccctcattattaaaaaatgctggacaccagctcgcttcaggaactaatactctttctttcatgaccaacacaaagaaagagcctatcttccagtgtctctctcagaagtgctgggaagctgcccctccctactctcccaaacatctcttcttgcctcatggccttggttggtccactcacccatccctgaaccacccaaaccaatgcaatgtgctgattggctaaagccaacctggtctcatcccaggaatagggtggcttggcttcgtaaaagccacctcagctggtatggaaaagaggtggttgctagagtggatgccaggcactgcaaccaaggttggggagaaggggttcaaaatacagtgcccacagtgaggttgccctaaggataagatacatgagactgccccgctggtgtggtgtgtgtgtttaagtgtgtgctgtatgagaggagagagagggagagagagacagagggagagggggaatgttagttcctctccttggacatgctgattactttctttctttctttctttctttctttctttctttctttctttctttctttcttccttccttccttcctctctcttttctttctctttctttccttctttctttctttctctttcttttctctcctcccttcctccctttctccctttctctctgtttctctctctctttctttctctctttctccttccttccttccttccatccttcctcccttcctctctctctttctttctctttctttctttctttctttcattctttctttctttctttctttctccttccttccctccttctcttctcttctcttctcttctcttctcttctcttctcttctctttcctcttggccagctcggtgactcaatctccttcctgtctcaggcccctcccacgaactggcccgtgtgtgcccggggaaggtcccttctcctcactgacctccacccacaccatggagagtggatgtgtgtgtgtgtgtgggggggggggggggcgggggacgctgcatcaggagacctctggttagggaatttttatcaggaaccacctctgtgacctttaccaacctcagcctatagtggggacaaggtcctacagcgtgggcctctcctttggaaggctttgggacagagttctgcccaccagctggaggacagtgacctcagggggagaagggacaggagactgctctccagtccctcaccccagccctcgcctttccctcacccacctttctttgcagcaagttcaaaggcaggtcatacaccagctaagcgggcacagctgggcacagttcccggggcctgccgggcagcgctgggaagggcggcagagagcgcggactggacgctcgtcttggaatgactcagccaggagcagccgccagcagcatgggccacgcagcaaacgggcgcgccgtgggagctggagaggccaggtcttctggaaccaggccagtgcaccctgcccgggcgtcaccccaccacggacattcacaatgacagtcagcacttctcagcacactgtggatcacacgcattagcctggcacctggcagcgccccgaggtgggcatcacggtgggattgggaggcactccagtcacagggttcaccagggccgaggtggcgacgaaaacccgtccctcgggcgtggcagtggcctggccacgtgcgccccagggcttgcacccgcatctcccgccggtggtaagcggggcctccagcagagcgggcggggctgctcacctggaaccagggccagccgtctcctcccctgcctcggccgcccggggcctgcctggggctccttcctcgccgcccggcggcagctcttgagctcccggcccgctcctttagccccgcaggctccctggccgtgaccctgtccccggcctccgtgtgatgagcaggcgagcagggccggggggatgcagcctgggccccgcatcctcaggcaggacggagctcccggctgctcggcgcctctgggggggggggggcgggggggggggatgcggcgcagcgggcggtcccagcgagtcagaagggtgcagcagccgggtcggggatggccgggcgaggctgacccctgccgggcagcgcgggtggcgccacgggcggaggcgacttcctgggccctggtgcacggcgccccctggcgggcctcggggaggcggcctcctgcgtgcccggaccgctcgctgcgccttcccgcctggcttccggttacccaacctcatctcgcccgagcctcatctgtagctcaccgtcctgtgcgccctgtgctgttggcagggcgtgtgggatttagagggttttctatactgagtcttcctcggagcaggtgaattctgcatagctggcccagttctgtgtcttaagtatggggagagagtgggggctggagaaatcactagcaggggaggagccctgaggttgccgagggggatcggagctacttcccaaggcgcctacaccgcccgtagactgggaaactacggtcacaaagggtcagcgcattccccaaggtcccagagccacacgcagcatggctggcatttgaaagtcaaagcagaggaagcaggcaggtggctcttgttgaactggcttccagagtctgtgttgggcagagagatccttccccgagagtggagtggcctcgtgctcacctgggttcagcgtcaaggttcacctggaatcacctgcactcttgtccttgaccaaggcagggtggttagccatgggctgatagccttggagagcctgattcagcctttgggtagagctgggtcagtccagcctcagggccatcactcacccgaagcattgtggtaacctgcctgcccctggagaccccgggtgtggggcagggtgaccgtggtggagagtgggagctggcagaggtaaggaggcacacgtctgccacagcaccagagctcagggcgcctgagaagcaaggtcatagcgtcctgttcttggaccccgtcagtctccacagctatagggggctccattgaaaagagtgtgccagaccttctctgtctgtgccctggtgagggctcactcactctccaggcttgctgggggaggaggcacgaacttcggtggaaagaacagaactcaggagccagagaatggagtttgactcctgcctcggacacttcttagccgggtctctagggggctcagagagcctgagcccccttcctcatgtataaagtgaggatagtaatactgctgaatccctgggtctgttagagaatgaagcgaggaaagtcaggcagagcacttaactaagtgcccagctcgcattaagtacaccatgctcatgcccatggccaggatggtgtgttccagctgcaacctttagcaggggccctggaagtgcttgtgtcttctgcttcgtccatcattagcagcagcagaaggtagggcagtgtttgcttctcaaaccaggtttctcacacattgaaagatattctgcatt

SEQ ID NO: 35 - DNA, 86908 bp, Homo sapiens
  source 1..86908: mol_type = genomic DNA
cccgctttcactgcctcctctctccaagtcctattttatcctccgccttcttttctacataatctgggaaaaggaatatggaagccccttaaactgaaaaagtcatgggaaagaggtaagcataagctggaggaagtaagaagcaggaagaatgggagttagatagtagaaagaattttctagctattttctaataatgaaggacaaggccaggcatggtggctcacgcctataatcccagcactttgggaggctgaggcaggcgaatatcacttgaggtcaggagtttgagaccagcctggccatcctggtgaaacctcatctctaccaaagtacaaaagttaggtgggcggtgtggcatgggcctgtagtcccagctacctggggaggctgaggtgggaggatcacttgaacctgggggcagaggtttcagtgagcctagattgtgccactgtactccagcatgggtgacagagtgagaccctgccgaaaaaaaaaaaaggaaaagaaagacagaaggactgtccctccctggactgtcaggggatgggctggagggggtccttctgggggacaaggaaagaagctggctcaggaccagggcatctctttaggcccagctcagagtgaagccaggaagggtggctgtggggtgctggtgattgggagcctctgctgtcactgctgttcactgcagagcaggactgtgggctggccccatggcctgagccccaggactggctgggtgggggtccgaagggctggggcacctgccagcctctcttctatgctcgactccccctcctctctgggatcctgggctgagactctggctgggaggggcttaccctacactgaggggcaccccgtctccccaccccctgcactaaatcttcccttgtgtctcaatgtctaggggtctctaaagggaagggggcctctaagcctttttctgtcttcccccctttctgatcctgggtctcctcatctttgtttctgactttctctgcctctctctgcgctgtctctatcttgtctctgcctttctcatgctttctgggtctctggatctctgtttctgaccatctctggctggctgtttctctttgcttccctctccctccctccctatccccgtgctagttctgggttcggtgcccttgtcctctttcctgggcctggatggccctctatctgggccggtcccttagaggccgggcaagcgtctcctggagaccgcctctcttcgccaggctgggctctgacgtccagctctcaggcagcgctcgcctctgcctcagcccggttgcaggtctgtggcccttgagcgaggccgccggggcacccagaagggagcgcggggtgggtggtgggaagggggaggggcgagggggcggaccccggggggccccccacaccgcgctcggccccgcccccggccccgcccctcccgggtccctgccggcgcccccagccgtgccccggccgcagagccgccgctgccacccgatgaatggagtcgccttctgcctggtcgggatcccgccccgcccggagccccggcccccacaggtgagggtgctgggccagggaagtgggcggggccggtagctgctggggagcgggctgccaagccagggtcgctgcgaccccgctcgccctgcacagcctggggcgcacggtgggcgcgggcaccgcgggcaccgctgcggggagattcagctggtggcaggcccgggagggggcccgagcaagagctgtccggggtagaggggtgggaaggacggaagcaggcaaggggtcgggacgggcacggggctgtcaggacagggggcacagacccaggtggcggtgccaggcccccagcggctgggcagcgggggcgggaggcccgcggcttttgttcgggtttttcaggcggggcgcctgccgccgtttcctctgcccgagttttcgttttccgttggcgaggccccggcacagctggagggagagggggtgggggagggggttccggagcgggacgtcctccactaaggcgtccggacaccccctccccgcgccacactcgccccctgccgggtcggactgcgggacgggttgccaggcgcggttccgccgccctcctggatcctggggaagttctagacacaggcccaggaccccgggctctgccggcgaggctgccctcccctctgccctctccgaccggctgtgggtgggtcagagcgcggggtgccaggggcattactcagcgctgggctgctctgcctgggttctttcatctgccagctgctgaggctggggaggggccagcaggggcctcccagccccatccccccatcagggccattcccttacctctgagcctggctgcccgccctgcaggagccccccagcaggcctccctgctcctaagttgaagggttgaacactgtcaggccaacagtttccctgagctcggaaaagaaattccccggggtccaggttgaggtcaaggccagggctgaggcctgttcctctttagacagggctgaaagacttggggaccctcctccccagctttcccggcagtgttgaaggtgggatctggtgcttgcaactcttttggagactggtgtgttccttggttgctggatgtgtgttcagttctccctcaatctgcatctctccccgactcccttcagccaaagtgtgtttcctaattatgaacttgaaattcaggatggacggggggtgggggtggaggtcatgaatccaagcatgagtcccttggattcaatcccccaccagcaacacatacttcatctctatcccctgcacccctctctgtctccaccccaaccctgcggcctagctgggggtgagtggcttttgatcccatgtggttctcccctctgccagggcaacagaccccattccccaaagtgacagctctcactgccatgtgctccttggcatgcgatttgaatctcgattatataaccagtcatttcgcctccaaaggcagcccaaaggcccccggccccagcggcttcttccacttgcccacagtgtggttgggtccaccccaaggtggctgggaattccaagatcctgcatctgaggacctgacctcttcttgggaaccatgggagcagtaaatcctctacattcagtgctggattcaaaggcctcaataataataaacaggaagaatgggagtgggcagggtaggtgttggtgtcccatttcacagagagggtctgagcctatgtagtgacagtgcccaggcaagaacccaggacacttgagggtagtcagggcacaagatgaagcttggggaggaaagctgttaggaaggtgtctgactacgggaataggtcaggcttgtgtggatcccagcccaagcagagaaggactgggtggggggaagaggccctgtgcttgtgcccctctcctcgggctgaccctggctcacggggaagaagtgcagcattcttggcatggatgggagtgggggtgagggagggtgctggttctgagcagagcagtgcaggagtgggtagtggattgcttcatcctacattgcagggatactcagaaggacttcttgatgtgtaaggttaaaagagagactacaaagcagcagcgtggaagaagttacagtgtgagggactgcagttagatactcaggagaacttctagggaggggcttgtgacccacagcatcccaggctagccatgcagggaagtttcctccagtatagtgggtcaagtggattcttgtgaagttggattccaatgtagaaacctggagatggtcattggagatatcaaatattccagcaaatatattcaaatgagcactggtgcctggaaacaaaaaatgtgtttttaaggaaggggagttgctttcacagtatagctcatagttaatacacagacagcaaaaactcctggccagtatttataaaaactacctcatttgatcctcacaataccactaagaggtagataccattattatccccattttacagttgaggacactgaggcatagccaatattgcagcccaaatcacacccccagtgcactgtggagccagggtaggaatgtggcagtctggctctagagtctggctctcaccctcactatctggcttctcaggacctgctatgtcccgctgtcactcccaccccaaatccgtgtccattttctacacagcccaagatcaaggtcagcttctggctggattgcagcttagttgcttgtcttttgttctatttctttactcctccaatctttcccaccctgccccatgctagcccatagcactgggccagggctcggttcactggtgttttccttccaaaggggcatgaagccctgctctgttggctgcaggggttcaaaggtaagatattggcttggtcagggatttggacaaagcctggttttaatgatcctgctctcaccatctcgggagagagacatgaatagggcctgtgggagctggtgctgcctttcccctagcaccctccacccgcttcaaacaacccgccttcagatccaggcccccctgtttcttgtgaaattgtgccagtttgtcagcagggcagtaccaatctgtgccaggtgggtgtctcctcccccattgcctcagtgggacatcaggctgagatggccttggggctggactttggggagattttaaagcccttttgggttggggtgtatttaccacctgtcagagtgggtgaggaccaaaggggtgatcgtgtccaactctgttacgctacagtggggaaacagactggggagtgcccaaggtccctcagcctcggcagacaaggacccatcttctgactcccagctcccaggccatgcctttccctctgtggttggttctgtccttcgtggcccccctcagtgcagggttcatggactgggctccaagagggagaggggagggcagggagctgcagggatgagtggacaatgtatcctgttcatctctgtgtccccagtggccagcacagagcctggcacagagcagttctccataaatgtttgtgaagtacaaaccagggaacagccccgcctgtggccccccagggcgccccatgcccagctctacccctgacactgtgatgttccatctcatatccgtctaccctaccaggtaggagttatttgaggccgagaaaaatgataatagcaacttcttccatagtgcttaccactatgttggtatattaccatcaccccacttgacagattaagaaactgacacaggccgggtacagtggctcacacctgtaatcccagcactttgggaggccaaggtaggaggatcacttggactcaggagtttgagaccagcctgggtgacacaaggagacccaatacctacagaaaaattttaaaaattagctggggccaggagcagtggctgacacctgtaatcccagcactttgggaggccaaggcgggtggatcacctgaggtcaggagtttgagaccagcctggccaacatggtgaaacactgtccctactaaaattacaaaattagctgggtgaagtgacacacacctgtagtcccagctacttgggagcctgaggcaggagaatcgcttgaacctgggagagggagattgcaatgagccaagatcacgccattgcattctagtctgagtgacaagagcaaaatgtagtcttaaaaaaaaaaaaaattagctgggcatgtagtcccagctactcgggtggtggaagtgggaaaatcacttgagctggggggttcgagtctgcagtgagctgtgattgcaccactgcactccagcctgggcaacataatgagaccctgtctcaaaaaaccaaaccaaacgaaacaaaaaagctctgcctgccttcagcctgctgaggtccaaattttagatgtactccttgttcactgtgtgcccttggacaagttacttcattgttttagcctcggctttcttttattcttttgaggcagggtcttgttctgttgctcaggctgaagtgcagtggtgtgagcttggtacactgcagccttgaactcctgggatcaagtgagcctccctcctcagcctcctgagtagttgagactacaggtgcatgccaccatgcccagctaatttttccattttgtattttttatagagacagggttttgccatgttgcccaggctggtctcaaaattcctggactcaagtgatcctcccactttggcctcccaaagtgcggggattacaggtgtgagccaccacacctggctggttttcttatccctgaaataatccctcaaaattacagagagggctaaatgaggtagtattggtaaagtggctgagatttagtaatctcaattattggtagcaactattattaaaaaaaatcaatggatagaaatgagaacaatgcacttttgcctcagtaaaaagtactgacctttatggtcagagcaatctaaagagaaagtgacctgcctctggaggtaatgaggcccccatcactggaggtgcagtgaggtctgggcaagcacaggctggagaatgatgtgcactagagagaattcagcaaaggcttggcacaggaaactttaagggccctgccttgggatcagcactatatgataggaaattagaggagcaggtgaatcctacttcctactgtggggcattgaggagagcaggcagagatgtccccagcctctgggaacatcaggggttggctgctatggtttggactgtgaggctccccagaggataggtagtcctgagaggctgcctggaggaggcctgcaagggtgggtatggttctgataggtgggaaaatgtgggattgtattctaggcccaggaagggcttggtggccgagggacagagaggagcctgggccactggtcctgaggttggccccggggttgcgtcatcatcctcgtgcctcagtctcctgggctgctgggattacaggtgtgccactacacctggctaattttttttatttttttagagacaaggtttcggcatgttggctggcatgttggccaggctggtctcgaactcctgacctcaggtgatccacttgccttggcctcccgaagtgctgggattacaagcgtgagccaccgcgcctggctggattttgtcatcatcctgggtgcccaaggggtttgggtgtatggtggtggcagtggggaaactagtaattccctgtcccgccaaccccccagcttctcctggaggaggagccagggctactcccggtggcaaggagcccgggcccgtaaggagcggaactggggaaagaaagacttcttatgcccagtgcatttgggggcgtccgggggtcggggaacagtggggcctttgtccccaaccgctgggaatctggccgaggagctggccctgggtctggctaggccctcggaaggcaggtcctctttgaagtgaccctttcaaagctcggcctgaatccctgggaggagagacagcatggggcggggcgtggggatgactgagacccaagggccgaggcctgagggatagaaacagacccggccttggcctcttggggtgtggaggttggtcggaggtgtgtgggccggaggaatgtggtgggctgggagaccgcgtgggagccatgtgggaggacaaccacgcaaggggccttagccccaagtgggggtgcacctaggcaggggccgagttcattctggcccgagagtgtttctgtctcctatctgacttctgtctggctctgtgctcctgtatcaacagctgcttcttcctttttaatttccccaaaagtgtgagagcttggaaagaatcgggtgtggacgccagactcagagctcttgggaggagggagaggtggggacctgggcaatccagagcttttcctgcttctgagagcccccgaaggctggaaggagaggctggaggggacacccccacctcccgcatagagtctcccttatgctcaaggtggaggaactctgtattgttcctgaaaagggacagaaggaggaggaaagctacccagagaggggacatcttcctttgcttcagctggaggaatatcagaggccaccctccttccctgtctctccatttgcctcatggggaaactgaggcctagagaagggacaggccaaggggatagagcagagaggaagggaccagcaagagtggaaggaagccagccctgtgtggttggaactgtagggactatggtggctcacacctgtagtctcagctactcgggaggctgagacaggaggattgcttgagaggatggatgccaagtgggaggaggaaggggcctcaggttgttgagttgtcataagagggttgtagagaagtgcccagagtcccttcagctctgacctgcggtgattccatgaaaagagggagaggaaggagtggttcctgctggtgagttcccaaggtccaagtagaaaggggcaccccaggcttttggactgagcaatgcacaggggagcctttggcagcccaagggagaaccttgcccccgaatctgatgctgtttgtacttcttgccctggaacccgatctctccttggcctcacggcagtctctgtactggggaaaattttttgttgttgttgttttcgagacagagtctcgctttgtcacccaggctggggtgcaatggcgcgatctcggctcactgcaacctctcccgggttcaagagattctcctgcctctgcctcccgagtagttgggattacaggcgccctctaccatgcccggctaatttttttgtatttttagtagagatgggcgttcaccatgttggtcaggctggtctcaaactcctgacctcaggtgatccgcccgcctcagccttccaaagtgttgggattacaggcgtgagccaccgtgcctggcctgggaagattcttataaatctccctttcctcttctggaggtgtggccctgggctcctccccaagagaggtggaggagggggcggaggccccaggctgcaatggaggctgtctgcgcactgttatcttgcactggcatcacagagctgagcttcattagctctaatgaagccttggcactgtgcccctcccacacagcacctagacgtttcaaggaaggcgagggggacagctgaggttgggtccagagcccaggagatggtcggggggatgtttgcaagaggagagggtaggaggcagaaaatggggaccacacaaccaggctggggttgccaacatgagggagaaacagcccctcttccttccccactgggagctttttcttctccagtggcccagaggcctaggtacccccagtgctagggaaagccttatctgagagacgggatgtggtctggggatgctgaggatattcccctcagctacccctacccccccaaaaaaaacgctgaggagagtgcccctcctgccctctccgtaatttcagccgggggcaggagaaggccctgatcccagcatgggaggcccagggcttgggaaagtccgccagtgggctggagccgaatcgaacccactgtcagtggtgatcactggttgctcatgctctgcgttccaggctctctcttgggacctggatgaatgagaaacaaccctgctctcaagggcctccttgtctgcttttcctaccgcccaaaagccagacaaaaagtctccacaaagactgtagaaccatgagttctaagatttgcatccagcccatcgatcagtccagaacacccctcaggggccccctgccaaaaatattaatgtaaaaacggcccagtctgactggggtgatggacctgcagcctacacaagccaatgtcttcaccatggtaatcgttggaaagtgagtgtggtcacaaaggcgataacgggagtttaaaactggaagccggaagctgggtagaattgccacagggattggttaaaaaccagttggtgatatgattaatctcctttctctcatctgtttccaaatctatcattaacctgaggattctatagtgaaatcctttttgatcgattttcaagtgccgtcataaagggggtgtataattacagatgcaacgactgagacctggagtgggcaaataacttcactcaaggtcaccaagcatcaaatttcaagctgggccaggcatggtggctcacatctgtaatcccagagacttgggaagcttcgacaggaggattgcttgacgccaggatttttttttttttttgagagagggttttgctctgtcacccaggctggagtgcagtggcacaatcaggcacacaccaccatgcttggctaatttttttgtagcgatgggggtctccctatattgcctaggctggtcttgaactcctgagctcaagtgatcctcctgccttggtctcccaaagtattgggattacaggcatgaaccaaagatcaatttgagaccaacatgggcaacatagcaagaccctgtctctaaaaaattagccaggtgtggtggtgcacacctgtagtcccagctactcgggaggctgagctgggaatattgcttggactcaggagtttgaggctacagtgagctatgattgcactgctgcactccagcctggacaacagagcaagaccctacccacccctaccccccccaaaaaatattaaagctgggtctttcagaatcctaggtctgtcattgtggtgactgctgtattctctgacaacaaggagcctgggaggacacccctcacccagggaagttagaccctcttttccacagctgagccctgaaatccaagcaaaggttggcataacgaaggggggggagggcagatgtaatgggtggtgggtgcagagagatgtagattaagttctgcttctctgtgtcttctgtgattcagtgtggagtctggatttgctcgtgagtggcgtgggggaccccagggttctgtcaataaacatggctgagcccctgcctcctccaaagatggtccagctctcaggggaagaaggcttcactgtggggagatgaggcttgccaaagcttgaaagatgtttgctagggccaggcacggtggctcacgcctgtcatcccagcacttttgggggccaaggtgggcaaatcacgagggcaagagatcgagaccgtcctggccaacatggtgaaaccccatctctactaaaaatacaaaaattagctgggcgtggtggcatgcgcctttagtcccagctacttggggggctgaggcaggagaatcacttgaacctgggaggtggaagttgcagcgagccaagatcatgccactgcacactccagcctggtgacagagtgagactccgtctcaaaaaaaaaaaaaaaaaaaaaagatgtttgttggggcaagaaagggatggaggagaagggagagaagggtgtgccaggcagagggaccaagcattagcacaggcaaggaggcatgaaccagcttggcctcttaagggattgatgaatacaaggcccagaatagagggaggaggtcaggttggcaaggccaatgagaccagatcccgccccttccctcccccatcaggtcgtatccctcatgccatactgaggaacttgctcccatagctactttggagccacacaagggtctcgggcagtggaggcagcagaccaggtgaaaggagatgggagctgaaactggaggtacagttggaagggtaggataagagtggagtatgttggctgggcgtggtggctcacacctgtaatcccagcactttgggaggctgaggtgggcggatcatctgaggtcgggagtttgagaccagcctgaccaacatggagaaaccccgtctctactaaaaatacaaaattagctgggagtggtggcacatacctgtaatcccagctactcaggaaggctgaggcaggagaatcgcttgaacctgggaggcagaggttgtggtgagcctagattgcacctttgcactccagcctgggcaaatagagcgaaactccatctcaaaataaataaatagatacatacatacataaaaatacaaaaattagctgggtgtagtggcgggcacctgtaaatcccagctacttgggaggctgaggcaggagaatcacttgaacccgggaggtggaggttgcagtgagccgagatcgcaccatagcactccagcctgggtgacaagagtgagactctgtctaaaaaaaaaaaaaagagtgggagtatgtcaccctcttcccctttccagaaacttgctgtaccgtctctttcccttgtctagaagggccttctctgccttttccatttctccaactcctattcctctttcaatgcccagttcaaatatcttccgtaaagcctccctccaccactcaaatatatggcgacttcctcctctgtgcgctagaccttgtgccccgtgagggtagggactttgtcttgttcactgctctatatccagcttctaggccaggccctgttgagtgaacgctgctgactgatgaattgagtgttcccatagcacttgacactgcattgcccaccaataataataacaatgggagtattggttatagcaaacttgtattgcgggcctcagggccagacactgctgtgctgagcactttacacacaccgtctctttaatctgcacaacaatcccatgggcgatggattatctctatttaataactgtggaaacagaagcttagggaggttagtaatttgtccagtgacatacagctaggaagtgggcctgagtcaggattcaatccagcttcctctgaatcctgcttaggaactttttttttttttttgagaccaagtcttgctctgtcacccaggctggagtgcggtggcgcgatcttggctcacttcaacctccaactcacaggttcaagcgattctcctgcccggctaatttttgtatttttagtagagatggggtctcatcgtgttgaccaggctggtctaactcctgaccttaggtgatcggcctgcctcggcctcctagagtgctgggattacaggcttgagctaccgagcccagtcggaacttttttttttagacagtcttgctctgtcacccaggctggagtgcaatggcgtgatctctgctcactgcaacctcctcctgggttcaagcgattctcctgcctcagcctcccgagtagctggaactataggcacgcaccactgcatctggctaatttttgtatttttggtagagacaaggtttcaccatgttggccaagctggtgtctaactcctggcttcaagtgatcctccgaactcggcctcccaaagtgctgggattacaggcatgaggcactatgcccaggctctgcttaggaacttttaaacactatgccctacagcacctttatttgttgcatgtctatgtctttggttttataaaaccagggactgcttttgttagtttttgaaaatcctcagactacgggactgatttgttgagcaacttctacatgccaggcactcaatgctgagtcctctccaggacccagtttacagctgaggagactgaggcttggagagggaaaggacttgaccaaggtcatgcagttgggacctgaaacctggcctctgactcgtcttcccttgtgtcactggcccccctagcccggtgccaggcccttggtggcacccagtgaacagtcctagaatgaaagaaagaggaaccggctctgaaggtgactgctttctttgggggcacacaagtggccggacaggggccgtggactgggcctccagcctctaagcccagtgtgtgtcccaccgggatcactgatgaggagagggatctagaggccgggactggggatgtcgtaatttccaggtgcccagctgtctgtcagacctgtgagctccaaggagaggctgacctggtgctggggtggtcagagatggtgtccagggcaggcagagccttaccacgacctttagaggcctccagaggctgcacagcgtcagtgggattttggccacgggtgaccagaaggaacctccaagcctgggaaatgcagctgcagtggccacagcgcaggtgggcagaggccctgggttgtgctgcaggttgggcactgccttttgctgagtgaccattcggcctatgctcccagccccacagggatccaccaatcagacctgcctgctgctgtgtatttgcatctcacttgcatgacaacaccccttgctctgtccccaagtgtgcttccccagcccatgccccattccccatttcaggccccctgtgcagagctcccgtgggaggggcagaaaggcccacctgggctgccagcctggcgcactattcatagctcagggctggcgtacttcacatacttggcgtttctcatgtctggctggcccaaggcagccacccctctgttgtcctcccctccctcctctcttctctctttcccccttcccctcctcccttaacctcttcccccaccttcttcctctcaaccaatcttcctgaaatctacagatgtccaagtccctcatcatggaagagcccacataaggaaactgaggccccagagagggcggggactggagggagaaaccagtagtgatgaggcgtataatgaggtggccgagagtctgggctctgcccacagcttcaatcctgagctgacattagctgtggcaccatggcagattccttagcttgctaagttaaacaagcgtttcagaaagtcaagctgagacctggagggtaagggttgagtcaagggaagaaggggacggggagggggcaggcaggcactgtattatagtccagggagaggggaacttggatgtggggagcaggctctgagtctcaggacaagggcttggcacgttgcagaacccacgaggagggctcgtggctggagtgtggccagctggggtgagggcacagagatgcaaagaggattgaagcagctcccccctttttccccacccctttctcccccactccttttttttgagcctggatctggctctgtcgcccaggctggagtacagtggcacaaccatggctcactgcagccttgaactcttggctcaagcaatcctcccacctcagcctcccaagtagctgggactacaggcgtgccccacggcacctggctaatttttactattatttttgtggagatggggtcttactatgttgaccaggctggtctcaaactcctgggctcaagggatcctcctgcctctgtctccccaagttctgtgattacaggcatgagccaccacgcccggcccccctttcttccttattccagcacccccgacttctggatctggttccctctgaggaaggggtggggatataaaaagcccctgcctctgccagacccctcctggggacagggttctggttacctctaactctctgaggaaaggctcattcattctccaacatttagaaacagtgtgcagagcacccaccctgggccaggaaccagggatttgaccaccagcaaagcagacatggtccttgccttccaggacctacagccctgtggggagatgttggtcaaaataagctcataaataagtagacactgacaagagggtgcacaggtaactgacctggtctggggccagaggaggtgtgcctggggaagtgacatttttgttaagagcaacagggtgggtaggagtgaatcagggcatgggttgcattccagaaacagcatgtgcaaaggacccgaggctggaagggtgcctggtcctcacaggaggtggaaggaggccagggtggccagagcacagaggaagagggtgtggtgagtgtgggggccaaggcgcgtcccacagggcctggtggtcataatattaaaataatcaatctggactgtcagatgccagagaggtgactgccgcttggagcagggcaatggtgtaatgaagtgagcagactccagagacatctaggaagcagagtctactccgatggggggatggagcgctggggccataatacctgattcttggttctcagcaactttttcaggctgctatctctgtctttattttatagctgaagaaataaggaaacttgagtgaccttgagtgatgatcttgaggtcacacagccagaaaagggccagggccagtaccaatggcaagtgtggccttttctctgtgttagccttcttgatgccaggacagtggtcactttctcaccatcctccctgtccccaagcctcggtgcccctgcaggtcacccagcattccctgcctagcacccaacccggtggagagccaggagttgcaggtggtgggtgctgggtgctaccttcatttccagaggttggttaaatgagttagcgcatctaacagcagctgcctggggcatagtaagcactcagcaagtattcttgactgtgtggctgttatcctgtccccaaatgtggggccaggcaaactggcagggggaggcgggaggaggatctggagtgaggatgatgccatctgtcttcttctgaccagagagcccagcccagggggctccctcatggtagtgacccaggggaggctgtttgtccctgcagagccactgtccctgccacctgtccagctgcctctgggcatcacagactggattagggagtggttcagttcataggcagggccacatgtgtgaaggggaaggcaggggtaaccgggagggatgggcagggctggggtgagggggtgggtggtttcaggggtggggctgacagcctctccctgaagggagccccatgtgcccccgggagactttcggaatctgctgagacctgccctgggaggggacatggtcttagcttgactgggacccagctcttgcctgaaggaaaccagtgtgtgcacctgttacctctgcccaggctgtcagacaacaggaagcactcctggggggcggggggcaggcggagtcacacctagagctttcccctagtctcctctgaaatgcactgtccagcgtgagaccaggggatggatctgctgaccttagagaagagtcattgcaggcattcccctgcctctaggaatgactgctccagtctagtctgaaaaggggctctggcctctctccttgaccaaagggagaccccgagattccacagttgctctgtccttctgcaggagattcttctcctttgtaggagatggggaggggaagatcccagggcaggttggagctgaggggcctggggagcgaggttgagggaatgaggacccttctgctcgctctgggttgtcaaggagacgaggcatgccagcgctgggccagcagggggctctgctggccacgggacctgcctgccaggcagccgagatgtgcacccttcattgtgcgggctcatttccaggagtgcctgagaggacgcggcggtgtctctgtgggcacacccttgtgtgtatgttacaggtgggtgtgagcgtgtggcgcgttggaatgggcatgtgtgtgcttggtgggtttgagggcccccacactgagccaggtttctgccaagaaaactcttccaagttcctgccggcagccttggaagagtttgtgcatgactggggatggcagcctctgtggatggcaggcccccatcaacgccaaggacctgatgcgtgccaggttcaggctgggcgatccccctgtgcggggacctctagggctccaaagatgacagtagagactctgaggaggtgcagtggagaagggacggcagggaaaggtcttccaggcaggaggtgcccagctcctgggcaacctctgtgggcagagacttctcctgggcaccaaggagagacctgttcatttgtttcatctttcaacattttttttttttttgagacagagttttgctcttgccgtccaggctggagtgcaatggcgtgatctcggctcactgcaacctccacctcctgggttcaagcaattctcctacctcagcctccagagtagctgggattacaggcacctgacatcacgcccagctaatttttgtatttttagtagagatggggtttcaccatgttggcaaggctggtctcaaactcctgacctcaggtgatccaactgcctcggccttccaaagtgctgggattacaggcctgagccaccgtgcctggccttttattttgtgtgtgtgtttgatttctgacttggcctttttaaaaaaatcacaaaatatataatacggccgggtgctgtggctcacgcctgtaatcccagcactttgggaagccgaggtgggcagatcacgagatcaggagatcgagaccatcctggctaacacagtgaaaccctgtctctacttaaaaaaaaaaaaaaaaaaaaaaagatagctgggcatggtggctcgcatctgtagtcccagctactcaggaggctgaggcaggagaatcgcttgaaccggggaggcagaggttgcagtgagctgagagcacgccattgcactccacactccagcctgagcaacaagagcgaaactccatctgaaaaaatatatatatataaaacaaaatttataattttaaccatttttaactgtaaagtggcattaagtacatccatattattgtgttatcaccataagtggtgatattccactatcaccgtaagtggaataatataatatttattcattcattcctttttttttttttgagacagggtcttgctttgtcacccaggctggagtgcagtggtgtgatcacggctcactgcagccttgacgccctgggctcaagggatcctcccatctcagcttcctgaggagctgggattataggtgcatgctaccacgctctgctatttttttattttttgtagagacagggtttcaccgtgtcgtccaggctggccctggactcctgacctcaagtgattctcccacctcagcctcccaaagtgctgggaatacaggtgctgggattacagatgtgagccaccaagcccagccaatattaatcctttcacttagcataatgtcttcaaggttcatccacattgtagcatgtgtcaaatatctttctttttttttttttttgagacaaggtctggctcccctaggctgaggtgtagtggcgcgatttcagctcattgtaacctccatctcctgtgctcaagccatcctcccaccttagcctcccaagcagctgggactacatgtatgtgccaccacacctggctaatttttttttttttttttttttttgggagagatgttgtttcaccatgttgcccgggctggtctagaactcctgggttcaagtaatcctcccacctcagcctcccaaagtgctgggattacaggtgtaagccaccccgcctggccttcacttattttaaaaggctaaataatacaattattattattcatatcatggatggattatatgtaatacaataatacagacaatttcattgtatagatatacctcattttatttgtccattcatccgtagatggacacttgggttgcttccatttcttggctgttgtgaataacactgctacaaacatgggtgtacaaacatttcttctaatccctgctttcagttgttgtggatatatacccagaagtggaattactggatcatatggtaattctgtgtttaatttttttttttttttttttgagacggagtttcacttttgttgcccaggctggagtgcaacggcgcgctcttggctcactgcaacctccgcctccctggttcaagcgattctcctgccttagcctcctgtccatgtttaattttttgagaaactgccatactgatttccatagcaactccaccattttatttatttattttttattgcttttttagagagggagtcttcctctgtggcccaggctgaagagcagtagtgtgatcatagcatcatagctcactgcagcctccaactcctgggttcaagggatcctcccacctcagcctcccaagtagctgggactacaagtgtgtgccatcacgtttggccaattttgcattttttataaagatggggtctctatatgtttcccaggctggtcttgcactcctggcctcccaaacactgggattacaggtatgagccactgtgcctggccacagacacaccattttacattcccacagcaatccaatttctccacatcctcaccattaagaaataatttttgagctgggcatggtggctcatgcctgtaatcccagcacttcgggaggccgaggcgggtggatcatttgaggtcaggagttcgagattagcctggccaacatggtgaaaccccatctccactgaaaatacaaaatttagccgggcgtggtggcacgtgcctgtaatcccagctactcgggaggctgaggcaggagaatcacttgaacacaggaggtggaggttgcagtgagccgagatctcgccacttcactccagcctgggcaacagagactccgtctgaaaaaaaaaaaaaaaaaaaaaaaaaaaagaaataatttttgagagcccgctatgcacaaagctctctaggagggcaaatccattctgaaaacccagcagccattgtccttagggagctctcagtctaagggggagactcaggccaggcccttgggcatcctccaatctgaggggaaagacacaggccatgccttttgggagaccctagactgatgtggggcaaaaatcccttgttttcaaggagcacacagtctgatggaggaggcatagcttcttccctttgaggagtctgcagacaggcctagagaccagaatggagaccccagagacagccaagggctgctgagtgggtaaatcaggggtacggaggggttgtggtaagccctgtcccaatgccagcctgctgttgcctgggcaatggccctggtgtttactttgtggctggctagacgcacccttttctgtaagtgctcatttcccaccaagaggaaagaggctcctctttagtttccccttcctctgttgtccctgagggaggaactggccctcctctggcactggagaccctgccagcctggcacctttgccatgctccttgcctgctgggagaggccccatcctggggtctcatgttgcccaccccttccctactcccagagggcccataaggtagtgctctgggcttgccaaagttcagccaaggaagtgggagatcctactgaatcctccctgcttgggaggaactggggcacgtcaagagcctgtaggaacctgaggctggcagtgggaggtgggggtgatgccgggaaggatgagcttgcctgggtctatgagcgtccacatgtgtcaccgtgtctttgtgtatccatggctgagtgtctgcatgtctgaatgtcagtgtgactgtgatgactatccaaaaagccgtcgaaacagcctgcatttattaaatccctactatgtgctctgagcctgtgctaagactttctttaatttacttaatcctcccaacaacctttgaggtggaaatacatgtcattaccattttattgatgaggaaccaaggcttaaagaggttaagtaactcacccaaagtctcatatctagaaagtggtagagatagggctctgactcagcctccagaggactccagatcccgtgtgtcagcccctgagctgtgctgccactgaaagaacttggggagttttttttttttttttttttttgagacagggtcttggtccgtcacccaggctggagtgcagtggcgcgaacacagctcactgcacccttgacttcctgggctcaagtgatcttcccaccttagcctcctgaatagctgggaccagaggtgcacgccaccatccccgattaatttttaaattttttgtagagatggggtcttgccaagttgcccagcctttttttttttttttttgagaccgggtctcacactgcagccttgacctccctgggttcaggtgatcctccccacctcagcctcctgagtagttgagaccacaggcatgcactaccacacctggctaatttttatattttttgtagagacggggtttcgctgtgttgcccaggctggtcttgaacttctgggctcaagcgatcctcctgccttggcctcccagagtgctgggattataggcatgaatcatcatgcccagacagattttgaggattttgtgcatttggcattatctcagcccacctccctgatggtggtgggatgtctggagtgacaagtgcttcctcatctcccttcccaggcttccgtggctctggcctagtttgagggagagggagcacagtccatcctaaccctgggcaagagtggccctacaggggaagagcactgggtctggggagaccctgggaaccatcccctacccgtgggccagacatagtgccagtgcggggtgcccaggttcccggtgatgggggttatgtgtacatggagggcgctgcggagacacaggcttgcttggccggctcatcaacttggcctgctggggcttgtcaggcgggagtctctacccaagcaatgctgggaaccaggcatctgaatggggcaaaagggtggaagaggcctgagggggccgccgcccttgactgaggagactggagcagggttcagaggcccaggcgtgggcggggcgggcatgtgtcagtatcgcattgcctgcatgcctgggatgcacggatctgtggtgggatttgccctgtctgtgtgcgaggttgtggagtggtcatgggtctgcgtttggtggtgtgcaactggtgtacaggaccagatggagcttcaaacatgctggatgactctcttggggtgggggcattgtttgtcacctggcagtttggggcccacattctgggaagagtgctgagcaagctggaggaaggaaaagcaggcagaatcgaccctgagcccctctctcacttccttaaccacacgccctgcaacacgtcagtttccttcttgctcctatctctgacccttgggactcaggacgctctcctccccttccccagtgcctacttgcttctactcctccagtccagaccatcctctcctgtgagggatagcctgggaggtgtctggccccaccctcaaaaaactgtcacctcccagagagaagaggccctgtgcacctgagagcagggctcccttggtttgtgggggtctcccttggtgggggtgaaggcagccggctttggccagagtctagaacttggggatccctaaaggtttcaggagctgggacaatattcctgaaagactctccaaagtatctcagctcctggcccacagcaggtactcaagatgtggttaaacaagagggtaatggaaaaggatctggtaagcggttagaaccctgggatctggtcccagcttagtgaaaatgagtccttgaactagtcacttgttctctttgagcctcagtttcttttttaaattttattcttatttatttatttattttgggacagggtctcactctgtctccctggctggagagcaatctctgctcattgcaacctctacctcccaggctcaggtgatcctcccacctaagcctcctgagtagctgaaactacagacacgtgccaccacacttggctaatttctgtattttttgtagagatggggtttcgccatgttcctcgggctggtctcaaactcctgggctcaagcgatctgcccaccttggcctcccagtgctgagattgcaggtgtgagccaccacgcctggccaagcctcagtttctgtaactgaaaaacgggtatcaaaaaaatctctggttatctgattcttagggtgtcaaatgagaacaagtgaaagtgctttcaaatggtaaaagacaatgatctcttggaaggagggaagactggatgccctccctttggggatgcagccttcaagcccctccccagggaccctcaggaagatgaggttgaatggattttgcaagctggtcaaactagagggggatggaaggggcagctcagcagggtaatttctgatgcagggggaggaagctgggcagggcgtggggggaggactcatgctaggcaggaaggcttggaatagaatctcagctacgcctggtatttcccagccctgggccccctccgccaccaccctctggggcccaccccacattcctttcccagaggaaatgggggagggagcggagaggctccccaggcctggaggatcatttattcaagctacataacctttgaggccccactgtgtgcactctccccctgaagtccccacagaggcagctgggtgtggaggtggtgggggtggggaaggaaggtgtggtttgtgttggaggaatctgttacctccttggctgggccttgctcccctgccaggttagagggcaggaaatggacattgtatatggttgatcctttccaaggtctctgcagtctgaacacagaaaacccatgttgcgtctccacctctctcctccctgctgtcccagaaccctcagcggttttgaattccgcagaggtggattcttgatctgggcacacagcagcacctgttggccatcagaggctccatgggggatgagaggggagagtcattccatttccttagaaccagggactggactagcagcaagaggaatgcaagttaggcacctgaaaggacttactggctgcttgctgggaggagaggccagacttggagctgaagacatctggttgccctccgcctggggccccagagtctgacatggctggggacatcttgatggtggttccagctggtctaggagggtctggcctttggagagtatgacggagtcacagggcaggtcagggcaggagtggtcccaacaccgaatccttagttttctagcgatggaagtggggcgggagagggtgccaatggagatggcgcgtcctgctctccccggctgcagtcctttcccgctctccccctaagctctcctgactcagctcgtggcagcctcactcttcccatctggcttccgccagggtgggggtggggggtccagctcttgcacggagggggagcccagcaaacaggaaacaggagaacaaaaccagctccctggctgacacaggcagccgcccccacacgcctcaccctcacccttcctctctcttcctcctccctcccttgatcccgacctccctcgtggtccgctctgctcccttccccctcccctcccacctccgtcccctaggctcccttcccgtccctttgcttctccaccttctgacactttgttgtctgctgccttcccctccctctgcccccaggcccctccccatctctgtccctccatctcccccccaacccccttgctggatttcctacctccccattgggccaccctcccgcaggttcttgctggggacagtggatggtggaatgggagggaaggggagctgcatctgcttggtgctcccttctggtagctgcctcaaaaaggcccaacccttatgacgcttcctcctggactcctcctagattcaggagtggggttgggctggagctgccccgctttcctggctgctggctaggattttggtgtaggatagaagttgggatgagaggccctggggttggagtcccggtgctgccataacaagctgggtcctcttggacctcagtttccttctctacaaatgaggccatagaaatggccccgggccacagtaagtggctgtggtgatattgttggtgaacagtcaagtgggctagaaatggtgatggtgattacacatccactagccaaggcctctgctagccccatccggatggggcctgggaagagcaagagccaggaaggcgagcagggcaggggctagcacaacatggcgcttcccatctggctcacatgccagggggtgggagagggggcagctttgaatgattgtcagcttgtagtgaccctctaggtagagctaatgggtagggagtcctgggaaggagggtggttcccacaggggtgttggggactccatctgcgcttaagagtgtgtggctgtcactctgtgcagggcagtgtgtgtagcactcgaggggctgtggcatccatgcctggagtgcctgagctgtgcagtgtgtgcgtggcatctgccatgttgtgggggtccctgtggggtatgtgtggagtgcgtgggtgggtaaatgtgggtctggtgtgcttgcacatgcatctctctgagtatgtggaccgtatacacttgggcggatgtctgaggtgtgtgtatacgatgtggaagagtgtcctgtgtgtgtgggggggatagtgtgtttctggggtatgtccacatagggtgagtgtgtgtgggcaggtggatgtgtgtggtgcgggtctgtacagagtgggtagggtgtgcagcagagtgagggacacctggagcatgtgtggctgtttctctgggtggatggggctgatgcgcgcgcgtatgcgtgcgtgtgtgtgtgtgtgtgtgtgtgtgtgtgtgtgtgtgtgcgcgcgcgcgctggaagggtgcaaggtgtgcgggccgggggagagtgcgtgtctgggtccagggctgccgtctgcgtgtgagggtgcgagggtgtggtcgtgcgggggactgtgtagtgccctggcgtgtggggtgtgagtgtgagatctgggcggccgcggacaggggccgccccggagggggaggcgtcagccctgcgagactcgcgggcgtgtcggggctcgggcgccttcagccgggaggcgcaggaggcgcggagccaatccagccgtcctgccgccgtccgcgcgggccgtccgtcccttcggggcccccgggccccgggcccgcggctccggggggcgggcggggacccccggggcccgccggccgcccggggggtcgaggacgccgtctgccgggcgcctagcagcggccccgggcccccgcgcggcgcgcgcgtctccggaagcccggcctggggcgtactggggccggggcagtggccgggcccgggagcccccgccggccgcggagctggtgggcagcgccgtgtggcgcgtggagcgcgcgggggccgggggctggcgctgggagcgcgccgtcggcgtggactgcagcgccccggaaccgcgctgcctctggctgccctgcctcagccacagcgaccgccgcgcgcccgggccgcgccgggccagggtgagagccgcggggccggggccggggccggggcaggccttgtcggggtctgagtgggactgggtcaccaactccctgcggcctttgagctgtgtgcgccctgcattccaggactgatgcccctggaacggggagtgagtgaggcacttgagagatggggctgagggtggcaggatttgtggcttggagctctgccagggcttctgggatgacaacccccagtctgggtcgaggcctccacggggctcagccctctcggtttccaggcagtggaaggatggaagggaccagagcgtttgaagagacgctggggcttctaggaatcccagagggtatgggtgggcagggaccccgagttccgaggcaggcagaggcaccactgaatggagcagggcccacgacccaccccacccctggtaggggacctggacacggcacacgagggtttcctagtgggcagaggaggctgagtggcagacgggccactgcaggtagtgagtgctctcagggctgacagggctgggctgggggactgccgtgtttctgatgtccgggatggaccaggctggtagggtgtgagtcacagtgggcgccatgcccggcctgaacactgtgctccctgcaatgacctctttatgctcccggggggaggagcagggctcctgggttctagtttctggtgctgccaacccaccacgtgtccacctctgcctaatttgtggcctaaggccgtctgccctgctgtcaccatcagctggtatttttggacgtctctttctttcctgacatgagggtgggagtgtttggaaatagatccaggccaggagaatttaatcagcaatgtccctgtgtcccctgagcaactccctctcagtccccttgtctctgtgcctaagtcagagaggcagagctgtgtgtgtgagctgtgcacctttctagttgttatcaatggctccttctgtggtttttgcacctatcacttcccccacctcaagatgagaacaagactcagttctgtcccaggtcacaggggaggagaggaaacatgcatgtattatagcatgaaggattgaggttaaacaaggaagaacttcccacaggggagatgccagctctggcttttgatgggtgtcctggtgtctcctcttcaagcaggtgtgtggtagctgtggctgtgtggtagctgacattctcaagagcctagttggaagaggtgggaggaaggggactggaaggaaggaacagaggaaagggagaggtagagataagggagggaatgctggtagtgcttggtgaggaggggacccggagaggaaggcatgcctcctaccctggattccatgcaggccctcccagggagcagcccccccaggcagctggcagctccaggcaggatgtgtgctgggggaggggcggggggcgtgcggggacctgtcccagccacttctcgtcactggggcagctggtggcttgaaccttaatccaggacagcagcaaaacaatgggccctgcaaacagcctcagctctgagcctgggtgggggacaggcagggggcagcccacactggggaggagcaggggcttctggtaggagagggcagttggtgaggggacccccagacccttttcgctccctgatcagttccttgccaggtcagcagagatgggaaatccgggggatttcagacctcagcagaattcccagagaattttctcctctgggctccccaggcccccatgggggtgcagggcaccgtgggagagactgggctaaagctacaggtggaagatgctggactacccctgatgtcaaaacccctgctgagacctcctggactgggggtcttccagcttttacgtggcccctgtctggtagggggcactcatagcctcatctgggtagttttccagaccgtataggagtagaacagtctagaacggtctgtctcccttgcctggagctccactcagcctcttgtatattccacctggctctgtcccctggggctgtatgaagcaagcctatagcctattgtctctgtcacatttttctttaatcttctgagatgggaggatctagcctcttccccagacctgctcgacagcagccaggctctcccccatgcggaaatccttagcagagggcagctgtctccctccactgggtgtgtggacaggagggtggatggtccatgaatgaacttattggcatcaggacatttgagctttctccagctacgagaaggggacaaaaggggatgttgctagtgaagcgggagctcctcactccagaactgatgagcttcttcctccacacccagcccctcagcctttctcctgtcagctgatgcttcctgcctggtgccgaggaggagttgaggggagtaaggagtgttggtggtgagggctttttgccctctgaggggcttggactaggggcaacatagaggttaggccacatgatgttatggatttaagagtcctctaggggtcctcttggcttttcaaagccaggcagcttctccgtggctcccatcttccccagttgggctccgtgagcaccctctatctgacaccctcctgtcacccaccttccctctctgtgtcccaaagggagccctgtctcaggcactgtttttcttcttgccccagaaacagacctgtgtgccccctccaaactcttgtcttcagataccctctgccacatcatcttggagaatcctgagaattttgggaggtctgacaggaggctttagtgtctctgaaacctccagccttttttttttttgagacgaagtctcgctctgtcactaggctggagtgcaatggtgcgctctcagttcactgcaacttctccctcctgggttcaagcgattctcctgcctcagcctcttgagtagctgggattacaggcgccagccaccatgcccggctaatttttgtatttttggtagagacagggtttcaccatgttggccaggctggtctcgaactcgccttggtctcccaaagtgctgggattacaggtagagacaggattttaccatgttggcaaaggctggtctccacccgccttggcctcccaaagtgctgggattacaggtgtgagccaccgcgcccagccaccccaagcctttctggtgaaccagccaggcctctgggctgggctctggagcctcaggaagtcccttcaggtgtctgatgtccagtccgctccctcttgtttcttggttccccctgtgttcctgctgctgttcttgaaggatgcgtgtgtgccggtctgctgtgcatgtgtgtatctgcatgtctgtgatgcatgcgcatgcgtctgtatgtgcattgtgtgtgcaggactttgattctgtgcaactctgtgcatatctatgtgtctacaaaagtgtgcacatgtgtactcatttgtgtgtgtgtatctgtgtgtctgcatatttgcacatgcttgtctgtatgtttgtggtatgttccgtctacatgagtgtatgtggctggggctgtgtctgcataagtatgtgtctatctgggagtgcatatatgtgtgcatgtgtgtgtgtgagattgtgcatgagctaagacaacgacaggcacttcctgggcaggaaggctgtatccagggtcctgcacatagtaggtgctcagtgaacatttgctgaactcagctgaactgaactgaatgaacttgcttcagtgagttattttcccaagggcaaagacattatgaggggactgaggggaaaggaaagaaggaaaaagctattgggctgatgaaggtgggagagtaaggaaggggtgaggaggaggtcatgggcagggaggatgcctggcaaccctagggcgaaagaccccttctggtgcccctccggtcctgtgggctgcaggaggtggtgcaaacagccagaagtgtcagccacacgggcgctcagcctggcctctctgtctcccacagctgccactgggcccaagagatgggtgctctcctaggcgccccttcccctggcaggggccgaggacgctgctgctgtacaaaagtccccaggacggctttggcttcactctgcgccacttcatcgtgtacccacccgagtcggccgtgcactgcagcctgaaggtatgcccggctcgccgctgccctggtctggggaagctttcatgagggagggagactcttttgtgccagtccccttcatggtcctttcaccctctcagagaggcagtccttcctggggtccggcctgactcccttctgctgtggcctggggaggaggactgcagggaggcagtgccagccttggctgggttatttgtactgtgtgaccgtggacaaacacttgaatcactgtggcctggggcttctcaggagacagggaggggtggctggtgcagggcaaggaccttgcaggtgggcagccaggatgctcacctcacacccccagacgcttgtctctggcaggtgaacagttgtctgggagttcctgggacccctgatctaccggctgcttctgagctggggttgctcctcccctctccagcgtgagctctcaggggcctagcccacctgtgggagccctcccagcacgcccctggcccctgctggccacagctcagtgcgctggaaacagacccaggctgggacacaggagcccagagttccggtcctgggacaactcctcactcattgtgaatttggggctgcctccccatctctgggctccatttctcctgctggaacctgaggacatttatcaacttgacccctcagagtccctcctgccctaatgtaaacgttgtgttctctgagtccaggaaccaggggtcctgaccccaatccaaggctgtgagctagggggaggggtccctgacagcgaagcagaagtgtgggaagaagacagaaggggccccagggagcaaccaaagcccccgactagggctctgctcccatcaccacttcttttccagcagggaggagacactgattttgcagtgaatgaacccctctatccactttccctaggaccgggatctgcctgtacagctattgggggactcccccttggtcccacctatcagagaaccaaacaggggacttcactgtctgtgttcgtgtgctcacatgtctctctgtgtgcatcgcgtgctggccatggacatgcatgtgtgtatctctctgtgtgcatatagtgtctgcaaatacatgtcatgtgtacatgtaactgtgcagctctcacatgcatgccggaagctctggggctcctgcataactgttctcattggctacagctgtgctgaagaacataagtgggggctgatggagtgtggagggggcacagacccctacttcatgcccaaggacaccagccccttagttctccggaacccccagtacttccttcactctttccccagaatgcccctcctgctgcccccagcatcttctctcaggagaccctgctgaagcgtgacagcatagagtctagggctggaagacctagggccaggcaagccagggacaggctgcctctcctttccagaacctgcccagggctgggaggggcctttggcctggaggcaggaggaggctgtgttctcccgtccttcatgctgccacctggcagcctgcagggagctcagccgtccaaatgcatctgtctgcctctgccactctctcgcagtgctgtcagcttgcatcagccggagtgcaccccacacaggaggacgggggcagagtgcttgctccccagaagggcccagcagctttcctgtgacccaccctgtcctcattggggtgccacagaggcctgggttccagccctggctctgccactgagtctctgagtggccttgaacacaccataccctgcgagctatacaatgggtacatgtgtggagagggttagaagagatgacgctgaaggtctgatccagctctaaaatgccacatccagctgacttagcctgttcctctgacctccatgccctccttcctcattcccccacaaagtctagtgccatcacctaccaggtgatcccagaggcctcccagtgggtccccttgacaccctgcacccaggtgccagaatcctctcccctaactctcattttcacctccactctctctcacagaagaacttccattggctccctctttctgtcctgtaagcctgagtgctttagcctgagtattgtcacttgctgttgttgactttctcctttaactcagcgattcagcccctggtgtgctgtgagcgcttatccctgccagccagcgtctgcacaccccgcctcccttgtccacagtgccttctacccgccaccctcagatgtcttttgagtcccctccccaggaggactctaatcagtcctccccttggtattccctggagctgatagctgtagtttgcgcttgtcacgtgcctatctgtgactgcccgcgtcttctgtgtgtgtgagcctgtgtgatgcctcccttgttgggctgggagctcccccagggaaggggtcttgggtcacttgttggattgcgggttccctgatggttagggtgttgaggcgatgggagcacatgtcactggggaacttggcctcggacttggtgcccctcggacacccctcccgcaccctcccctgctgggctacttgggaggagataaggggtggcgggaacctgaaggggccctgcccactggagctgggccacccctggctgctgagggctggactgacgcccacacccactcctctgttccctgcaggaggaagagaatggaggccgtggaggaggtaagggaggactggcgggcgctggacctgcacaggactcctcttccagctcctgtctctccctgtcctcccctaagactgcctgtccttttctgtgcccccctcccttgactcctgttcctgcctttgctcctgtctgtgcccctggtctggccccctctgggcacctcctcctcactctctctgtcctccccctttcttttcgcacatttgtctcccttgggcatttcctccacagaagtttgctgagctcggcacactgtgggcggcactctggggcgcagatgggtgtctgccacctggcccctgccctcaagctgctcccagcctagaacaaggcagggcagggctgcagggcctgggggctggtggtgggagcgctgagcaaaggctgtccttggaggcggagacagtggagtcctggtggaagtcagggatcccccaaggtctttctctcatatgatgtgagcctgactccccttgctgtggctcttgctccccagaggcccctggtggacacccaggcccccaggttattcaaggcagagtgccttctctggcagccttcctgctctgccactggggctttcgctgggcagccataggacactcctgcatccccatccagaggccgtgatgagggaggagcccgctgacctagagcggcccatttctctgttagcttagagttagcagcacttaggagcagagaaactttgttggggtgcaatgcgatttgtgcccaccctaggggcctcggacctctgcttggagtccctgagcctggggaagggaggaggtgggggatgtgagtattaggtgtcttgctgggtctgcgggagtgggcatccctgtgaggagggcgtctgactctgccacatgtcttcagaactgttatggcctcttgtatggcgccctttcctctgtctcgtgacttgtgtgtgctgcacatgtgtgtgtgagaatctgcctcccccactggacagggagctctggaaggacaagggctgtgcttgttcatcctttttttttcttttgagatggagtcttgctctgtcacccaggctggagtgcagtggtgctatccgggctcactgcaacctccacctcccgggttcaagcaattcttctgcctcagcctcctgagtagctgggattacaggtgcccgccaccgcgcccggctaatttttttattttttagtagagacagggtttcaccatgttggccaggctggtcttgaactcctgacctcatgatctgtctcggcctcccaaagtgctgggattacaggcgtgaaccaccgcacccggccttttttttttttttttttttttgagacagtgtcttactttgtcacccaggctggagtgcagtggcacaatcccggcttaccacaacctctgcctcccaggttcaagtgtttctcctgcctcagcctcctgagtagctgggattacaggcatgcgtgccaccacacacagctaatttttgtatttttagtagagacagagattcaccatattggccaggctggtctcgaactcctgacctcaagtgatccacccgccttggcctcccaaagtactgggattacaggcgtgagctaccgtgcctggcctgttcatcctttttagtgtagtttttagcacatgaagaggacacaggaggtgtttacggagtgactctttgtatgtccccataggttttctttctcccaggtctgtgtcctcctgttgggttctgtgcctccatggacctgtccagtgtcctcgtggatgtttgagcctgtgcatgtttgtgaccggacgagtgcaatcattctctgagtgtgtgtcccctgtgtgtgtagctgtgcatgggtgtgaccttccccagccacccccagctaacctggctgatgcccactaggaccctccccccggtaccgcctggagcccatggacaccatctttgtcaagaatgtgaaggaagacggccctgcccatagggcggggcttcgcacaggtgagctggcccagttacctgggctctactttctaccttctggctaggattttattctcagatccaggtgttggggaggctcctgtccccacagtgttagccatgcctggtacaggggttctcagatggggcctttgatgccctttggtcaccactcatgcgctccttgtccccaggagaccggctggtaaaggtgaatggggaaagcgtcattgggaagacctactctcaggtcatagctctgatccagaataggtgagtgtccctgacccctcgtcccatattatctcccctcccctttgccctggggatgccctggagaccaggatcccttcctcctggaccctgttccttgacccagcctgacgttctgcctgtctctgtagtgatgacactctggagctgtctatcatgcccaaggacgaggacatcctccagctggtgagtccagcccctgtggcctgagaggagacccctgagccctggggcagcaccggctcccctgggaggcagagaaggaagtgtttggagggcacaggccgacattgcccagttggggatgccaggcccctccctgggctggggctggttgttgcttcattcggagctgctctgtgctgggggagcgggagacctggccttggcaggcaggattcctgccagggtatctggaaggagggtggcccagcaggctctgccagcctggcacgttcttgtcagctcctaggagagatgcctcttccctgcaccccctccctgtctggccctgagtgagggtgtctctggtgggtgtgtccacacaggcaccgagcacacatcgaacactgctcagcacactgcaccccacccaccgtcatgtgcaccacacagtacccgagcagtacacagccacacagcacagccccacagtcccaccctctgtatagcacgaagcacaccacaacacacatgcagcaccaggcacgtgccgcaatacagacaaccacacaagcacccactgccacagttcaccctcatacagcgaagtgcaccacaacacacacccacaaacattaaaacacgacacactcaccagccccttggctccctgcagtacaaacagcatagtaccttgcacactcggacctccacaactacacacccacgccgcactatcacaacatgtatgctcgcaaacaccgcggcatcctcctgcccatctcagcacgtgcgcccacccgtgtcacaggactccaaatttatacattcgacacctcagcatacctagaagacagcatccagcctgccacacagagagcgtggcccagacactgcacgaagcaggccctgcactcccaagcatacccttccacacacacacacacacactcacactcacacactgcctctttgtgcctggagccccggcggtccgctttgcccagtgcccacctccctggtctcatgggtcccagccagatggcggcttacttgcccctgaggtcactgtccctggggaggccctgggagccgctgtgctggcttctgccttggacgcactctcctaatcactgtaatcacagtgccatgcctggcatgatgcccttctggaaacctccacccctgacctcgattgtccccttgctcttcctggggagagggaggaaggagggggggatctgaggtggactgcttaccccaagtctcaaggccctgcctgtacagctcccccaggctgaggcgaggccagctatgggggagtgacagggtgggaccctagggtgtcccccactctctccagttggcaggggcaaggagtgggaagggcagtagcctcaagttctgctgcccaggctggggtgggctggcagcgccagatgacagcatctgggggcctccactggcccccgcatctctgccagccggagggtggggcccaggcattcctgtggttggaagccaaggctggaggccaatcgggcctcggcagctgctgacgccaccaccgacgcggcgaggcccctccacacccatcctctcctccctcctcctcccgccagccagccgagagagagtcgggtgggggtgagggggagccgcagggagggcagacggagggggaccggaggccctggccagggcaacacagtggtcagtgggggggttagccggagctgggggtgggcggaggcgggctgggatgctgccgccgccgtgatgatgccgggagcctggggagacggcgggatggcaggagggagaggtatgtgtgtgccggccctgtgccagctggagggggctgagtgtgcgggggtgtggtttagcttgtcctcatcacatgatgtttgtgcctgggactggaggtgtagttatttgtgtgtgtttcattgtgttttactgtgtgtgtgtgtgtctctgggtgtgtatcttccagtgtctcctcgtagtgtggtgtgtgtgtgtgtttggtttcaccctcccaccctttggttctttgccttgagttaggctcctgggcagctcagcaggggccaggctgggcccaggccacaaggccgctgtccctgggagctgactccttttttggctgggcctgggcgctggccctgtcactccttagcaatgcagcgtcagcctcagctcccagtgccaaattccaggcccaggggtggcagaaggtggctcaagtcccctccttcaagcctggcaggaggtgggcaaactccttctcacccctgtggctcaggagccagctccccattcccggggatggagggacagctgggctctgccagcctctgccccacccagacacacccctagccggctttcttctctcatctgccaccttgactggtctcggtggggttttccggctccacccgaggagctttgggcattggtggacataagggggcaggcaggcggtggaggccaggactgggggaggaccccaggaaacagatgctggaatgtttgtggctagggcagtccttgtcacagtcttagcgaaatcccacttttgctggagtttgcctgcgtctcaaaggcttcttgcttcttctttgttctctccctggacctgcccttccacccccacccacttatgcctctccctcgttccccccaccgcttggtcctctcccttcatttccctcctgggctccttgacctcctcgggctgccgttcccctaccctgtgggacttgtctggccctgcttacctgtctctgtgtctctggccaggcctactcccaggatgcctacctgaaagggaacgagccgtattctggagaggcccgcagcatcccagagccaccgccgatctgctacccccgcaagacctacgcccctcctgcccgggcctccaccagggccactatggtgcctgagcccacctcagcactgcccagtgacccccggagtcctgctgcctggagtgacccggggctccgtgtgccacctgctgcccgtgcccacctggacaactcttccttggggatgagccagccccgccccagccctggtgccttcccccacctctcctcggagccccggacgccccgtgccttcccagagcctggcagccgggtgccccccagcagactggagtgccagcaggccttgtcacactggctgtcaaaccaggtaccccgccgggcgggggagagacggtgcccagccatggccccccgggcccgcagcgcctcccaggaccggttggaggaggtggctgccccccgcccgtggccctgctccacctcccaggatgctttgagccagctgggccaggagggctggcaccgagctcgctcagatgactacttgagccgggccacccgttctgccgaggcactggggccaggggcactggtgtcaccccgctttgagcggtgtggctgggcttcccagcgttcgtctgcccgcacccccgcctgcccaactcgggacctgccagggccccaggccccacccccgtctggcctgcagggcctggatgacctcgggtacatcggctaccggagctacagcccatcattccagcgccggaccggcctcctccatgcgctctccttccgggactcaccctttggggggctgcctaccttcaacctggcccagtcccctgcgtcattcccaccagaggcctccgagccacccagggttgtacggccggaacccagcacccgggccctggagcctcctgcggaggatcgcggcgatgaggtggtcctgaggcagaagcccccgacgggccgcaaggttcagctgacccccgcaagacagatgaaccttggatttggtgacgagtccccagagccagaggccagtgggcgaggggaacgcctgggcaggaaggtggcccctttggccaccaccgaagactctctggcttccatcccctttattggtgagtgatggtacatgtggctgtcctggaggacttagctgtcggctgtctgtgtcctgctgtaccccatctgcctgtctgccatgggcagaattcggctgggtgctggtgggatcatcttgtttctctgtcaattcattcatctgttcatccatccatccatctgttcttccatctttctttctgttctctgtcatcctttcttccatcctacctctcattcatttatcctttcagcatctttccatgcactctttcttttttccctctccccatccatccatccatccatcatctgttcttccttccttctttccttcctctctccctcctttgttcattcatttgttccatccattcatccatctatccatccatctattcttccttctttccttcctctctccctccttcttttgttcattcatttgttccatcctttcttccacccattcatccatctttctttcctttgactcttccttccattctcccattcttccttccatcttccctttgtatctttccctctttgtcctttccatccaccctccatccctccatcgactcaacagatatttgtgtcaggccctgtgcatggctccatgctctcctggactggatggcccagcagagggtgttggacatgcagggacaatccattgggatgggcgtgtcgtgggacagggagcttgaggagaagggctcagagaagggctatggtgagaatcttggagaaagaacatttgggctaagacttgaaggatgagaaggagtttatcaggggaagaatattcaaggagagggaatagaatatgcaaagaccctgaagggagagaggcaggacccccttccaggttgtgaggaccctttcaggcccaagggtctcattagtcactggggttggcttttgagagcagagggaaccctctaaggcttgccttgccttcgactggatgcaggagagggagaggcaagagagtagagtggctgggtgatgcccaggtttctggccgggcttgggggtggtgcctcacccccgtgttgggagtgagagggggacaaagttcaggactgttgaatatgaggtgtccaagagggagcaggatagacggggctggggagaaagagcaagatgcagggtaatggagagggatggtggtagatgggagatgagctcaccctaccagacagtgagagggaggaggcctggggcagggggaagacacagccctggctcccccagccagccttcggtggagcagagacacagccccttctgctagtaaggaaggctctaggctgtggccgggagaggcagtctcttcttccacagcgcagtctgtttgagggggagatgtcatctctgcccttgaggagccccagctgatgggggagcttttgcccttaggaagctctcagtctgatggggaagacactgcccctgccctcaggaggctcttggtctgagaggggagacataattcattctctctgagtgccctcagtctgatgagggagacaccgtccctgccctcagcaggctcccagtctgatgggggaatattggctctgtcctctggagcccggtctaaggagggtggctcagccccactcctgagggtaaggattccatggccacagtctggacagtgggccagtcatgcttgacagtgggcatgttgccagcaggaccctttgggatgtgtctgagcctggaggcgagtggcacgggggctggcaaggctagggtggaggcaggcaggctccgctgtctgctgccttcacacctttctccttccacatgcatagatgagcccaccagccccagcattgacctccaagccaagcacgtccctgcctctgctgtggtctccagtgccatgaactcagcccctgtcctgggcaccagcccatcttccccgaccttcactttcaccctcggacgccattactcgcaggactgcagtgagcactccccacacccccagccccaccctctccctcgctgcccagtcccaggggtctctgttgggcctgctgcttgatgtctggcctcttcctctggtttccgcttctcctgcggccccttgggagagtcacctcctgcccctgcccagaagggagggctctgggaagcccctgacctgctgccccgctgaccctgaggcccgatgtgggcggctttgcaggcagcatcaaggctggccgccgctcctcctacctgctggccatcaccacggagcgctccaagtcctgcgatgatggactcaacaccttccgcgacgagggccgggttctgcggtgaggccctgtccggacacggggtggggtggccacagccaccgtggccagctgctctggggcagggctcttggccctgggggtcctctatgcatgggacagtgtgcctcccccgctggaaggcttctgggcttggggtttggtgggtgacgagatagtgaggtcccagctttgctgcccacatccctcaccctcgaccctcgctttccaggcgcctgccaaaccgcatacccagcctgcggatgctccggagcttcttcaccgacggggtgagagctgcaagtgtgtgtgcgtgcgcaggagcgagggtgtggggagagagggtgtcagggaggtggggccacagcctcggcatgggggttcctgctccagctcctgccttcctcctcctccctgcacccctcaccctcgtgtccaccgcgggacccgccctctgctgtgggccccgacatccctgaatgacaccatgcagccccgcccatgggccctcgtctggactgcctctttccagacccatcccccatagccacatgactcacttctcccctgtcttcgcggctttttaggtcttccctgaaattccagcctccgctcctgacatttcacgcctcccttcgctactctatgttttcctcctcagcacgcctcatgcacaattggtgtttcccttcctccctgcctggctccccagctagaatagaagctccctgaacttatatttggggcttcatttgtttccttcactaccctcagtcagtatttgcatcgcgtcttgtcttcatgggatggggtcggggtggacactggaaaggtgtggccgggacacagggttgagactggtggacaggtagagttcccagcctcaggacctggggaggcaggatcaggcctgtgatagccctggctgtttgtttgttttgagacagagtctcactccattgcccagtctggagtgcagtggcatgatcttggctcactgcaacctccaccttctgggttcaagctattctcctgcctcagcctcccgagcagctgggattacaggcgtgtgccaccacgcctgggtaatttttgtatttttaatagagactgggtttcaccatgttggccagactggtctcgaactcctgacgtcaggtgatccacccacctcggcctcccaaagtgttgggattacaggcgtgagccaccgcacctggcctcaaatgattttcttgcttcggtctcccaaaatgctgggattacaggcataagccatcacacctggacatatttttgtttttaaaatcatatatatatttttcatgcatgatttttctttctttttttttttttgagatggagtctcactctattgcccaggctggagtgcagtggcacgatctcagctcactgcaacctccacctcctgggttcaaccgattctcgtgcctcagcctcctgagtagctgggattacaggcatgcgccaccacacctggctaatttttgtgtttttagtagagatggggtttcaccatgttggccaggctgatcttgaactcctgacctcaagtgatccacctgtctcagcttcccaaagtgctgggattacaggcatgagccagcgtgcccgccccacctttccctggctgtttttgattatagatggactggaaaagccatcttgatgtcaagcgctctgtctcattggttggttgaacaccctggtgatattggcacctagcttatttcttatcactttttctgcttacttaactctcccttgacttgcgccctctggctggagtcctgttgagactgtcacttcctctgtttaactcctcgtggacatgactacctgctccactcactcagcctttgttgatgttcccacttcccctgtttatttaactcctcgttgacacgatcacttcctccatttccttgattcttctaagtctataaagttatgggaggctccgaattggctcctgtagtgtggtgaggcgtgtggtctgctgacaggtcgtagcctttcctcctttctggcttctcctttatgtacgtctcatgacctcaacacaagtggtccagagaggacaagcaatgcccatgaggtcgcacagcacatcggggtgtagcacagacatatatcaggcctgtgcggccacaagtggtccatggggttcctgagatgctggcattgtgggagccaccctaaattgtcctctgttgtctccctgcagtccttggatagctggggcacctctgaagatgctgacgctccttctaagcgacactcaacctctgacctctcagatgcgaccttcagcgatatcaggagagaaggctggttgtattataagcagattctcaccaagaaggggaaggtaagatgggtggaggaatgaggtggaagctggctccagcagaaccctccagcctctcctaggcctaccctgacagcctctggagccagagagaaccagtgtaggttgttgcatgaaggatggaggttagatgctaggaagaacttcctggcagggggatttaaagaacttatgtaaaagaagttaacaagagaggtggattttgctgtgggatggatctgatcgagtcatgcttggaatattctggcaaaaccatcccacacgggccctggcttgacaggccatcctgaagatggccgctggggctcatggaaaacaaggagcaaggccggggtgatttccgtaggagagctaaggcccaagaagacgcaggcaagccagcaaagggcttagtgttcatcctaagggcaaccaaaagctctcgggggctcttgccaagggagttacagctttaaaatattcatttggctccctgggagtgagttagggaggggccatgctggaggcaagaagaccaattaggagccaccgtggagatccagatgagaggcgaagggggcttcggggagtagttggggagggcctgggagggaaccagcaggactctgagaggagaagggcagggcccctggatccatggggtgcaaatcctggccccaggctgcgctgtgggctggagaagtgggaggagagaccactgccttccctcctggcgattaggatgaacccgggtttgactcttgactgcatcacccattgctctgagagcctgggtgactcacctggccatgactcagtgtcctctcctgtaaatggagctaacagtaatccctagctcataagcctattgctaaggattaaatgagatgatctaagtaaagggtttacccagtgcccggcacttgaagctgctgtacttctgcttactgctatttgttttctttttttgagacggagtctcgctctgttgcccaggctggagtgcagtggcgtgatctcggctcactacaacctccacctcctgggttcaagcaattctccagcctcagcctcctgggtagctgggactacaggcactcaccaccaaacccggctaattttttttttttttttttttgtatttttttagtagagacggagtttcaccatgttggtcaggctggtctcgaactcctgacctcaaattatgtgtctgcctcggcctcccaaagtgctgggattacaggcgtgagccaccgtgcccagcccgcttactgctatttgaattttctaccctgccttctggggtcttgggggtccctggaaagaacataagctttgaagcagacagactttgagttcctatccggccacatatcaagcacgtggctttgggcaccccacttaccttccctgagcctcactttctgatctgtacgatgggaacaatgttatcctaccccaagggctgctgtggattaagtgagggtgaagtcgaggcgggactggcgctcctctgtggagaatgactaaggccgccctgctcgggagcctccgtggaggttctggggagttagtggtaagggagccagggcagccctgccctcctggggctcctgtcgctcctgttgagcagagagaacgcatgtggcgtcatggttccaagtgcacagactgccgtgatgccggggtgcgggggcgggtgggcgtgggtagggaggtatccagaggctgagacacgaaagggtgagaagccacaaaactgggagacagtggaggggcctgacagggaagatgtctccttagagggtcctggggagaggggtgctgggagccagggcgagaggtggaagatgagctggggaattgggtgcctgcccagagtgtggggccttgatacccaggaagagcctgtccagggttttattattttattttattttatctatttttgagacggagtttcactctgttgcccaggctggagtacagtggtacgatctcagctcactgcaacctccgccccccaggttcaagcaattctcgagcctcagcctcctgagtagctaggactacaggcgcctgctaccacacccagctaatttttgtagttttagtagagactgggtttcactatgttggccaggctggtcttgaactcctgacctcaagtgatctgcctgccttggcctcccaaagtgcttggattacaggcgtgagccaccgtgcccagctctgtccagggttttaaatgtgggctggggatggcaggagactggggttatgtctgtgacaggaggagccaatcccattgcccttgtccaggtgagtgaggctgggggccctgacccaaggcagtggtgtgaggccgggtggagcagacactttagagagagattccaggggaaggagggccagggcttgccggctgctgggaggtatggaaggaggaggaggcgataaggttcctggattcctggcttgggctgagggagggtggtgggtggtgggaccctccctgggccatggcatactggaggaacaggtttggggagaggaagccaagtggctccactggggctatgtgagtctgagggccctgggacagaccccagtggaggtgtcctggggacagaggctctgagggcgtggcactagagggaggcccacctggggatggcctttgtctgtcagcaccgacgagttacctgtgcctctgtgcaggggcttgaaggaagaaggcaagagacccggctgagccttgagagaagtgggggggccggggaggctgacagagaccaaaaagagccagcaagttggcagtgacccatggggtgggagccatgaggcaaggagggaccagccatgtgcactgtgcgaggagagccacgtgtgggccagcccttccagtctaacgtgtgagccacatgaagggtccttgtgagggtggctggctccccctgccggggagcctgaccctcagctcctgggggccctgagcccagttcagggacaggagctgtccccttcctgctcactggccagttctggaggaccaggcctccactcccttgctggccaaaacccgatatcacttgttctcttggtgccgtggcctggacgttagaggagagtcttcaagtcagcctcaggcccttggtccacccaggccgtgggcaccctctctgtgctccctcccagccccagcctctttcagagacacggactgtcaggcagaggagggaaagggacagtgacttgtccccgcagcctcagccccagcatgggagctgcatgcagccttggtgaccaactctctcactcatttaccagccggagacactgaggcctgggagtgcggttgacttgtcctaggttatgcctctggtttagcctcagagaggtgcccttgtcaccacctcactgtcacattaaaattctccctggagggctctgctgtctcctgctctgaatgtccctgtccccatccagcagttctgtgatgagcagggctcacagctcaggatccacacgatgggaggccagatgtgggctgtgcccatctgccagccacggggtctctttgtctggtttgttcggagagctgaggcctgtgctggatgtggagccaccagccagcagagaggagctcttggtctgatgggagatggagctcctgccctcagggtgctccaaggatcattaattcatttattcaacaaatattgatgagcccttgcatgctgctgctgtaggccctgggatatggaaatgagaggacggacaagctccctgtccccaggacagcctgaggctgcagtaagttcttggaaaggatcaagctgatcagaagcgggagctgcattgagggaaaaatatggccagagaaggcctcactgaggaggtgacgttggtgatgctggagctcagatctgaaggggaagaaggaagcagccacatatagaagtgagggagggggcttaggcaaaaggaacagcaagcggagaggccctgagaaaggaaaggcttggctcgctcacctgcaagggccccctggcttgacatagtgagaaaggtgtgaagatgaatttggagaaaggcagggacagaccacaggagaccttagatttgattctgagggcgatgggatcccttgagaggatgctgagcaggggagagatgtgatctccttttcattctaacatgatcgctgcagctgctgctggagaatggttgcaggagcgagagtagagactgggaaggtctgtgcatcctctaagcaagaggcgttgatggcgtggaccgggtggtggcaggaaagacagagacgggatgttttggaggcagaatagttgtgacttcctgatggatgggatgtcaagggcgaggaaaagggaggagtcaagggcagctcccaggtttctgggcaactggatggattgactgggctggaaaagatgggggtggagagtggagaaggggtttgatggtaagaaatcacatggcctggcaagtattgtgcaaagtgcccatgggacctgcaaatgaagccactgagcagggtgggggtgccgggctgtggctgggagagacgctgggcttgggaatggccatcagcagatggacctagtttaaaggcacggcagaggtgacatccttgagggaggtgtgcagggagaggagaggagaggagagtcaggacaaagttctggagctccgcctcctttagggcggggtctcttaccctcagctctgctgacattttgggccagataattccttgttgggggaggctgtcctgtgcattgtgcaatgtttagccgcatccctcagatgccatagcacaccctccagctccctccacacaaatgtcccgtggggactagtctcctggctgtttaactacaggtgtagagggtgggggagggcaagtagagaagactaggaaggagccagtggcattaggaagaaagctgggaacgtggggtctcaggtgccgagatagggtctggagagggaaggaggggctggctgtgtcagatgccgctgaggggttaaggcaagttggggagaagcagccactggctttggccacatggcggttctgggtgtccctgagaaggagcttctgggcaagtggagtcttgggtgggcggcaggaaagtggggagaacaaccctctaagagtgcggacggcttctgagcaggtttgctgggatgaggggcagcctggggaggggcgtgggctgggaatggcatccccaggatttcatgtatggagggccatgctgggtgtctgagcattgccaccgctcggtgagtgttgatgctggtgtttagagggggagagggttggggtctgctggggggctttaggatgatgggtaggggtgtctaggcaggcaaggggctgagaaggcattggtgggctgtgggcaggaggctgcccaggtctagccgggtggagcagggggctcctggtaggcagcgtggggtccatcccctggctgtcctctgtctgctactctgagagcagtgggcaaaactggcctctcaccattcctgtctcccccaaccccgtgtctccctgcagaaagcgggcagcggcctgcgccagtggaagcgggtgtacgccgcgctgcgggcgcgctcgctctcgctgagcaaggagcggcgggagcccgggccggcggcggcgggggctgcggcggccggcgcaggtgaggacgaggcggcgcccgtctgcatcggctcctgcctcgtggacatctcctacagcgagaccaagaggaggcacgtgttccggctgaccaccgctgacttctgtgaatatctctttcaggctgaggaccgggatgacatgctgggctggatcagagcgatccgggagaacagcagggccgagggcgaggtgagggcccggccagcccggcagccacagagggcgggcggggtggcctctcaccggctgtggacctgggatgcccgctctgagcctcacttccctctgctagaaaggggggctgacaggagtgcacctcgtgattgtgtcccccaaggtttcggggtgaggagggtgcacaggcagggctcacgggggacctggcgtcctcaggtgcggggaccggcagtcaccatcctgaccctaatgatgacagggatgattgtgactgtgttaggatcgccttgagcaggctccggtgtggagtggtcagctccaggccagtctcagcttttctcagcaggcgaggaaggcaggggcctcctatggagtgtgttagggcatgagtgtccccgcaccagaactgcactgggctggcctgtctgcagaaggatgagcacattgaccttgtgaggaggccgagaggcttggcctttggccacaggtgggcaggggtggagccaagggcctcggcagggattttgggataatttttttttttttttgaggcagagtctcgctctgttgcccaggctggagtgcagtggcgcgatctcagctcactgcaacctccgcctcccaggttcaagtgattctcctgccttagcctcccgagtagctgggactataggcgcatgccaccatgcccggctaatttttttttagtagagatggggtttcactgtgttagccaggatggtcttgatctcctgacctcgtgatcctcccgcctcagcctcccaaagtgctgggattacaggtgtgagctactgtgcccagccgaagaattttttttaatggtgcccattgtggtcagccatagctacactccaggggcctaggtagggattcctccctgtttacttctttggccaggaacctacacagaagtgccttgagacacccacacaaagtcatgtgggcgtcccaggcctggggtctctgccaagagggcagtgggcctgggcctgctgtggccgtgggagggggtgctagtgcatggcctcttgctgaggtcacatcctcttactgaccaggctctgctctcccgggaacagctttccccactgcagggaggaaggcacctggaatttgggcctcctcctctgggggcctctcttggctgtccccaacaaggcttagtcaggggatcccaagtcaccatcactatggcagtagcagtccctcctggggcacctcctccatgcctgctcagtgtctgccaggacggtggcgagtgctgcatgattctgcacccggccctgagccttccctgttagccccccatgtttattaccgaggagactgaggctcagagaggctaagaggcttccccaaggcctcagctggtgagagggtgctggggagtccaggcctggtctttctcactccagggtctgggctgtccacctggcaggtggacaagaggggaagcagggctagggatgagccctggggtgggctggctgtgggcactgacatgatccgctctctcctctcctgcttcaggaccccggctgtgccaaccaagctctgatcagcaagaagcttaacgattatcgcaaagtgaggtgaggcccagccctcgtggagcagtctcctctgtgggggtggtagggggctgaaggcaaaggatgtcttcctggcccacctccagggctgccctctgctgggggaaggggtatccagggtctccaggctgcagttaggcatggaggcattgcctcagggtggaggggaggtcccgaggggcgggaggccagggtgggtggcctgcttggccaccccaaatgaagacctctcctctccccctttttcctacacagccatagctctgggcccaaagctgattcctcccccaaaggctctcgcggcctggggggcctcaagtctgagttcctcaagcagagtgcggcacgtggcctcaggactcaggacctgcccgcagggagcaagggtaggaaggtggccactgagacagggtggtgtgtgggggcagggggcatggggaggggagggcacgcgtgtgtgtgttgggctgtgtctgctcatgtgtgcctgactgtgtgccagggctaccggtatgtctgtctgcgtgtgcatgcctgtgagggtctaggggctctcagggtctcggggtggaagggcctggagcctgattcccgtccctgacatccctgctgggtggtcctctaatctttgctggtgtctctgcagggatgagaggcccaccctttccaagagcaacctttcccatttcactcacctttggctgttagaaagttcttacctggctgggcaaggtggctcacacgtgtaatcccagcactttgggaggccaaggcagggcagatcacctgaggtcaggagttcaagaccagcctgaccaacatggtgaaaccccaactctactaaaaatacaaaaggccgggcgcgatggctcacgcctgtaatcccagcactttgggaggccgaggtgggcggatcacgaggtcaggagatcgagaccatcctggctaacacggtgaaaccccgtctctactaaaaaatacaaaaaattagccgggtgtggtggcaggcacctgtagtcccagctactcaggaggctgaggcaggagaatggcatgaacctgggaggcggagcttgcattgagccaagatcgcgccactgcactctagcctgggtgacagagcgagactccatctcaaaaaaaaaaatacaataaaagtacccgggcgtggtggtgtgcgcctgtaatcccaactacttgggaggctgagacacgagaatcacttgagcctgggaggtggaggttgcagtgagccgagatcacaccactgcactccagcctgggtgacagagtgagaccctgtctcaaaaaaaaaaaaaaaaaaaaagaaagaaagttgttcccttgggccagcagacatggtggctgacacctataatcccagcatcattttgggaggctgaggctggaggattgcttgaggccaggagtttgagaccagcctgggtaacatagaaaggtcctatccctacaaaatattttttttatatattatttatttatttagagacagagtctcattctgtcactcaggctggagtgatctcagctcattgcaacctccacctcttaggttcaagcgattcttgtgcctcagccccgctagtaactgggattacaggcatgtgccaccacgcccggctaattttttttttttatttttttttgagacggagtctcgctctgttgcccaggctggagtgcagtggtgtgatgtcggctcactgcaagctccgcctcctgggttcacgccattctcctgcctcagcctcccgagtagctgggactacaggcgcccaccaccacgcctggctaatttttttgtatttttagcagagacagggtttcaccgtgttagccaggatggtctcgatctcctgacctcgtgatccgcccgcctcggcctcccatagtgctgggattacaggcgtaagccaccgcgcccggcccacgcccggctaatttttgtatgtttagtagagacagggttttgccatgttggccagctggtctcgaactcctggcctcatgtggtcctgccggcctcagcttcccaaagtgctgggattacaagcataagccactgtgcttggcaaaaaaaattttttttaattagccaggtgtggtggtatgagcttatagtcccagccactcgggaggctggggagggaagattgcttgagcccaggaatttgaggctgcattgagctatgatcataccactgcactacagcctgagcgacagagactctatctctaaagaaacaaagttctatggcttccgccttgtagttttggcccacgagccacacggaagtccttgcattgctctgggcctctcctttggggtaagcatcctccccttcaggccttctctcttgccatacaatgtcccatcagccctgggcatctggtttcttctctgatggaatccccatacgtccaaatgtgtgaatgtggcagtgaatgtgtgtgaccctcctggataccccagctcactctggctctgtctcccccacttcagatgacagtgctgcagcccccaaaaccccctggggcatcaacatcatcaagaaaaataagaaggccgctccgagggcgtttggggtcaggctggaggagtgccagccagccacggagaaccaggtgagtctctgccacacgccagagcaggcccagcagggggagaccgaggcacagagggtcagagcagcaagggacatggaaccagctctccacctcattgtacaaacacagctgggaaaacagcccagagaggggaaggcccccgcctgccccgggcctcccagggagggagcagcagggctgaggctgagcccggctccttctcagaccatggcgaggctttggtgtcatttttagctcccagactggaggcagcaagggccttttgttccccccaagggttcctggcagcagctctgggccttgcattgtccccttcttggcctccccagctcctctggcccctgtcccccctaacacccctcccatgtgtccccagcgcgtccccttaatcgtggctgcatgctgtcgcattgtggaggcacgagggctggagtccacaggcatttaccgagtgcccggcaacaatgcagtggtgtccagcctacaggagcagctcaaccgcgggcctggtgacatcaacctgcaggatgaggtgggtgaagctggggggtctgtggaagaggggctgagatggtgtgtgggtggtgctccgcttggagagttctgtggtctattgtgttgcatgcattgtgccctatgacatgcccggcattggtccagaacaccaagatgggcaagatgggacctgcccccgctggccagcccggggatgggcatcaccccaggctgaagctgaccaagtaaatgcagtcatggcctggggagctctgaggcagaggctcacagatggcagttttgtccgagtgtttaggatgagtagagttcaccaaaggccggtgaaagccaggtgagggcattccaggcagcagaatggcctgctcaatggtgtagacgcggaaagtgtgccaggagtcaaccagctttctctgtagaaggcagagggtaaatattttctgctgtagtttgctctgttgcgttccccccttctcttcctcctccttctcttcctaatcctttaacaacgtaaaaaccatacttagctcaagggccatccaaaagcaggctgtggctagatattgcctacagaccatggtttacaaaccgccggcttagaaaaaggggaatatatgatgttttctagaatggccagcaatttgggtggctgcaacatggaaagagaagtggctgatcaggcgagatgagaccagcctgtgaagggatctgcaatcacacttaagtgtttccagcaaggccggcgattctcaaagggtgttccccagagtcctagggttccccagaggggccttgggaggccaggggcaggtcaggaccccctgtccttgctagagcaaccctgctttgccctgtctgttgtactgggttttcatgtacaattttatttgcccaaaggggctctgataaaaaagatattttggaaaaccgtgaacgtgggcagtgatgtcccacgaatcacacacgtgaaggctcatggaatacacaagtcttcctgtccttggagaatgaggagctgagacaagtgtgtgtgaaattgtggacaagagaaaaagatgatctctcatcagggaccacactgtgatgaggaaggagagggtgctcaggctggagcaggtggtggctggagggtttgagtattggaggaatgaataggagggggcaggtggacgggaagcctttcggggtgtgagacgatggcattttccaaaaccccagcaagggccggggagggcttgagggttaggacagagagtggatctacctcctgggcttggaggtggggagggtgaggccccagggggacagagaaggcatttgatggcttcactgaagacttcgaccttgatctgatggacagtagggagcttctgatggttcttaagctggggaggcatcgtgagaacaaagttcaagaaacagtaatgctcctgctcatgtccattggatacgaatgcggagggcaggggtctggggagaagtcactgatctatggaagcgctaagtgtcgggaggacttggtggtctcaggggaagggggaggatgggagcaaccctaagagttgtctgcatgagagggaggaaggaggggcgaggaagagccgcatgtttgagctggggctggtggtatcttcccttggcagaaaccagggagtggggcagcgtgaggagaggcggaagggaggggccgtctcagggagtggctccattggatttggggtgtggaaagtcccttgcatggggtgagggcataaacaggcgctatattgagcctggactagagagtggcatgggtcctgctgcagctgaggcatgggatgaccaagggtgggccgcagaacagcaggggccacgctctgagtgggacagaaggagagggccgccagtgaggctggggtgagggcagacacttcactctggaggaaccaggaagcactggccagggcattgggtttggcagctgggagatgagaggagctcacacctgagggccaggaggtaacggagtcgggtgggcaggagccgcactgggtgtgtgtgagatgagggggccatgctggcaggcagctggtccaagccagggccagctgggggcatacgaggtatattgggtgtgttgttttgtcttggatatcattgtgtcatttgttgtgggtcgtgctgggagtaagtgtagtgggggatgaatctaacccctggtgagcctgtggggagtgtattgtttatgggattgtctggcattaagctgtggatccattgtaatgagtgtgtgtactgctgtactgtgtctctttgttgggggtattaggtcgctttctgggcctgagttattctgagccattcccagcgaggcggctgtgcccaacttggttgcaatgtggggtgatggtgccccctggaggacagaagggacaacgacccggccgttagttcttgtactcgacaaccatttattttagagtagggtttctcaatctcagtggacattttgggaagaacaattatttgttgtgtggggttgtcctgtgcactggagggaatttgacatcatccctggcctcgatccactagatgcaagtggcacctcccagttgggaaaatcaaaatggctccagacattgtcaaatgtcctctgtgggtggagtgggagtttgggggacaaaattgcctccttctgttagaactactgatttagggccatgtaagtaccaggttaactgtccttgctaggtgataggagcacagtgggaaatgagacagacgggatcctgtctcctcctggagcttacagtcctgcagggagacaggcatgaacacggaaacaaaagcagaaaataatgacaaattgggttaagcgccaggaaggaaacaaagtcagggctggggtgcaggtgacagggcagtggtgaaggtggctgctttagctatgagggtcagagaaggcctctttgaagagcgacttttaggcggggatgaggagccagttgtgtggaggcggggaggaaagttctggttgaggaaaccagcacatgcagaggacctgagacaggaaggagccggcacgaatgactgctgtgtcacggatgcttaaactgtgcccagtggaggcagcagctgccactcactgtctccccacagtgcctgggactttctgtgcatggggaggtgttggagcccacgcactggcaggagcagggaggggctggggccaagtgtgagtgtgggcacaggacctctctggggactcagttctgctgccaccatcctgatgagtagagagcttggtctaagtaggtcccagggagggcctggtgggcttgattgggctctggggtgaatgatcgtggaggcatgggcatcgggctgggcctgcctgtgcctgacatctgacccctcccccagcgctggcaagacctcaatgtgatcagcagcctgctcaagtccttcttccgaaagctgcccgagcctcttttcactgatggtgagtaggaggtggaagtggggcggggaggggacaccagtccgtgcctcaccctgaccactacttttgcatttggtttgttggttttactctttttttttttttttgagacagtcttgctctgttgcccaggctggagtgcagtggcgcaatcacggctcattgcagcctcaagctactgggctcaagcgatcctcccacctcagcctcctgagtagctgagacagcaggtgaacaccaccacacccagctaatttaaaagttttttttcagagatggggggagtttctcactatgttgctcagactggtgttgcactcctgggctcaatcaatcctcctgcctgccccagcctcacaaaatgctgggattacaggcatgagccaccacgctggcttttttttttttttttttttaacacaaaagcttatttaaaaaacatagattgtacagatgtgaatgaagaaaacagcacaggaccctgtgaatgtcctgctccctttcacgggaggttgtggctaacactttctgagcattagagtgtgccaagcacaactccctacagcaactccatgaggaaggtgctattgtcttccctctacagattaggaaaccaaggctcagagaagtttaatgccttgcccaaggtcgcacaggttgtaaatggcagagccaggattccaccccaggcgtcgggcaccgacgggctttggccgtttgctgaactgcttattcacaatctgttgtgtttctctcctggccctcttatatgcatggcagagatacacacgtgcctgcgtggggtttggatttgggtgggttcaggggtgtgctggcagatgtttaacatctgtctctgggggaaaaaagccctaatgcctagcgttttccagcttccatggcgtaaatactcctaccatggtttatttcaagccaccaacatgatgtcaccaacatggaattgggaagagaggcacacagtcgctctcaggagctggtgtgagcgggctccagcacaccgctggttgagttgtttttaacaaaagcagagttgtaattctgagattcattcgtgtcagtgcagagagctctacctcattcttcttttaaatcagccacatagaatttcatggtttgaatagactacaatttctttaagtactcctctattgatggatatttaggttgtcttcaaatgtttgctattacacaacctgttgcaatggctttccttgaataagtccttgcacgcctggatctgtgctctctaaggagattcttagatgtagaattgctgggtcaaagtcccggtgaacctttctgagaccagtgtcaattgcactctgagaaagaggccctggtttagactcccactaaaatgtaggagtctgtctctccacatccccaacagcattggatattataactattattgttacttgaaggccaggcatggtggcttatgcctgtgatcccagcactttggaaggctgaggcgggtggatcacctgaggtcaggagttcaagaccagcctgactgtggtgaaaccccgtctctactaaaaatacaaaaattagctggatgtggtggcgggtgcctgtagtcccagctgctagggaggccgagacaggagaattgcttgatcccaggaggcagaggttgcagtgagccaagatcgcaccactgcacttcagcctgggtgacagagcaagactccatctcaaaataaataaataaataaataatacaataaaataaaaataaaaatactattatttgacacagaatcttgctctgttgcccagactggaatgcagtggcgcaatcatggctcactgcagcctcaacctcctgggctcaagtgatcctcccatctcagcctcctgagtagttgggactacaggtttgtgccaccacacccagctaattaaaaaaaaattttttttggtagaggcagggtctcactacattgctcagactggtcttcaactcctggtctaaagtgatcatcgcgcctcggcctttcaaagtgctgggattttaggcttgagccacctcacccagacagcattaaatattattaacattttaaacttttgctaatcagataagggaaatggtatctcattattgtttttattttcattgccctcattactagggagattaaatcttttttcattagcatattggctgtttctattttctctgtaattgctcgatcagaccatgtgcccatttttctgttgcgttgtttatctttttcttatgttgatttgcgggagaaaagctctttgtgttttacagctattaaccctttgttagtttttgcaaatatttgctttggcctgccatttgcctttcactttgcagtatagaaactgaaaacaaattttttgttgttgttgttttgttttgttttttgagacagagtttcactcttgtcgcccaagctggagtgcaatggtgtgatcttggctcactgcaacctctgcctcctgggttcaagcgattctcctgcctcagtctcccgaacagctgggattacaggtgcccaccatcatgcccagctaatttttgtatttttggtagagacggggtttcaccacgttggccaggctggtcttgaactcctgacctcaggtgattcaccctccttggcctcccaaagtgctgggattacaggcgtgagccaccgcgccctgcctaacaatttttaattttatttttatttaattttatttattttcttgagactgagtctcaccctgtcatccaggctggagtgcagtgttacgatctcggctcactgcaacctccgcctcccgggttcaagccattctcctgtctcagcctcccaagtagctgggattacaggcgcctaccaccatgcccagttaatttttatatttttagtaaagatgaggttttgccacattggccaggctggtcttgaactcctgatctcaagtgatcagctgatgcgcctcagccttccaaagtgctgggattacagatgtgagccactgtgcctggccgaaaacaattgtttaaaatgtgaccaaagctgttcatcttttcttcatggattctgcatctcatgtttaggatggccttaggattataaaaatattttcttactttttccccagtgcttttataattttcacagttggctctgccgtgtgattgcatttgtgtattgtgagctagaaatgatccccccgcccccgatggtagccatttgtcccggggacatctgttgaggcccccatccttccccccgattggaagtgctgcctttatcatataataaatatccatatggcccgcttcccccctttctagccttaacattgctctgccttttctgccgtgccagccggcttcagttgtgccatccattcgggatgtttcagtccctggtagggcagatcctcccgcgttactctttctttaaaaactattcctggctgtctttgtgcgttagctcatccagatgaatttcagaataggcttatcatgttccattttttaaaggtccccatggacttgttctgaagggagttggggtaatccttggtggaggctgtctgaagcccctcctcctctccaggtgcccttctcttctgacctgctgaaccttggtgtccatgtcctggagacgggggcagggaccccttttctgggatcagcatgcagctcagatggtattgcctcccaaatgaacacagctgggctaccccaggtcaggtgcacacccgagtgtagctgtggtgagtgcagctgtggtgagtgcagctgtggtgggtgtgttcacatacacaagaggctgtcgcccacgctggagcccccgaactggaggagttcaaaacacagccctcccagcagggcccttggccgggagaacaggggaaggcgctgcccccacctctctaaagagtctccgctgtgttctagacaaatacaacgacttcatcgaggccaaccgcattgaggacgcacgggagcgaatgaggacgctgcggaagctggtaaggagagagaggtgctgtcagacacgaggtggggcagctgcctgagcacctctgtcccaggaggcagggagtccggtgctgcccacgacccctgtggccttggagaagccccgctccactcagggcctcagtttccccgtccatacaagagaacggggggttagaggataggttccagactccctgaggcatggtagtgggagatctttggggcatggtgatgacgggggacaggggcaggcccttacagcctgtccccatgcccctcctctctcctgctcagatccgggatctcccaggacactactatgaaacgctcaaattccttgtgggccatctcaagaccatcgctgaccactctgagaaaaacaaggtgggtaggagtcccgcatggagtctgggggaggcaagcacggacttactgtgtgagggccctcagcacgcactgagctccagcaggtccagtaactcaggcccctctaggcacgccctcctcctatgactgctccgtccccaccccgctcctacatgctggtcagtgctttcccccagagagccatctcctgagtttctgagggctttccagaggcagggaaccccggccccccgtatccgatgcattgccatcctccgacttagctcaagtccctcgcattgcattttcctcatcaaaccccttatgccttctggttctgcagtggggaaaatgaggggagtgataggattttttgtgttttgtttgtttgtttgtttgttttgagacgaagtctcactctgccgctcaggctgcagtgccttggcacgatctcggcttactgcaaccttcgcctcccgggttcaagcgatgctcctgcctcagcctcccgagtagctgggattacaggcacctggaagtgatcggattatttcccaggcctaaaataacccctgggacctccaacatgtttcctactgcagggtctcccactgctggcactgaccactcagggctgccttgtataggtgtgcaggttgggcactgctcatggctgctgggcctggggatgaaaggggctgaaatctggtctgtgctctactcatcaagcatctccatgcccatacaagggggtgtccaccctctaagctggggactggtgaggatgtagttggggacagaggcctcaggtgccagagtgagggaggactgaggtcaggatgttgacagtgacctgctttccctgctgcccagatggaaccccggaacctggccctggtctttgggccgacactggtgaggacgtctgaggacaacatgacagacatggtgacccacatgcctgaccgctacaagatcgtggagacactgatccagcacgtaagcccctgttccggggggcgcccggcagcccctggggcccaggccatgttcctctgagcccctcgctcttgctccgcctggcggagtgtgccccaggaagggctcggcagctttagagcatgctgctagggtggtatatactcctccaaagccatgggctgcatttcaaggcaaggcaggaatggatcctggaatccctgctgccctgggatgttgtgtccccagcaggagagtcaagaggcccccgagcttccgagatgcctgggaaaggtagaagaggaggaagggcagggaaggtgctactggtggagggcggaaggggcagcttcagaagttggcccctggagaggtgtcctggcagacacgagcagacgggggccaaggtctggcctgatatcaggaggccccggctctagtgactttccctgctggccccactgaggttttggggagatagtggtgatgttcctggtaacaaggggtggatggggcagggcacagggccttggcctgaggcaggatcctgcaccagtgcttggcatgtactgggctggccacctcccttctcatggcttcctggatgccaacagccctggtcctgtaggttcttgttactgtgcatgggcggaggagaacccagagtggccagcagagggcgcagaaggccttggttttcgagagcccaaccctaaggcagcactgccgccttctggtgtgcacacggatatcattatgaatcgtagattttccatttccaattcttgttacagcccacaaaggatgagaacagagcccctcctgccaggggaaataagactggcagctggtcagaggaagggaagcctcagtcccaagccccctagacactttagggaaggaaagctgggccctatcacccccattttacagaggaggaaacaggctcagagaggcaaagcaacttgctcatggtcacacagctaataagtggcagcccaagatttcaagccagatctgactaaccaaagcctgtgctttcctcctgctatcaacccaaaggccagactcctgggtccctccttgagctggcttgggacggagggagggggccagggtaaggaggcgaggtggtgagcagctgagccatgttaacagccttgcttgcccatctccctccttcactgcatgctcagggctccgagccacaggagggaagatcacagcctgctgcatccggacactgggaacaccactccagagctgtctgggaggccagggctgccctgcagcgtcggggatcctgatgaggccttgggaaagcttagctctccagggcaccagggagccccggaacctcccgtgagggtgtgttttgggggcagcagcagggaagaatgggtgtctggccctgtgctcctggagaagtccctggaagcccaaggtctgaggtcagctgaggtgtcaggaactgcagccttcagggaggaaggaggccaaagccccaagggggagtccctgctctgggcagggtggagaaggtggagtttgtctcatttagcactgacactactggcacacagtggctactcagtgtttgtggagtataaatgactgagtaaattgctaattgaggttacgtcaggctgggcttttctttctctttctctctctctcttttcgctttttttttgtttttttgttttttttttgatagagtctcagtctgtcgcccacactggagtgcagtgggcagatacggcccacttccaggctcaggcgatcctgccatctcagcctcctgagtagctgggactagagatgccaccaccacaccacctggctaatttttgtattcttttgtagagatgaggtcttactatgttgccagggctagtcttgaactcctggactcaagcgatcctcccatctcggcctcccaaagtgctgggattacaggtgtgagccatcacgcccagccaggctgggcttttctactcagagattcattcccgagagctaactgagctagtgtccttcccttctctgcctccttggcatctgaacgtaaccagccctggatgattgtcgagggaatgagccacccactctgcaagccctgaaagcctgcccacccaagcgtgccagctctgtctagcctggaggctccatagccagggcagtgctgctgtcacttggggtacccagaccagtcttcaggtcggaaagagcgtggcaactgaggggtaaagaggaacagcgacttgcccagggccacgcagcaagataatggcagagcagagaggagagcaaacctgggtgtctgatcttgcagcgggcaagttgccaggagcccctacctatgtttacgaagtcaaatggaacccaaacaaagatcacccagggcatttgctcagggactcactcagcaaaggcagcgatacctaatgtttctcagcctcagcactagtgagcgctggggtccagataagtctttcttgtgggaggctgttctgtgtgttacaggacatttagcagcatcgctggcttctacctgctggatgctgggaatatcactctagttgtcacaatcgaaaatgtctccagacattgccaagtgcccactggggtggggggattgacggcagtggctctggggccagcctgctcctatgtgctgtgtggccttggacaagttccttacctgctgtgcctcagtctccacacctgtaaagcagagatgacaatactgtttacctcacatcgttgtgaatgtctgctaaagcactcgcggcggtgcctggcaggtcctaagtgtcgtgtgagaacggactgtcatcctcttcgtcgtggtcattattccacgccagagacagatccccgtgctgggaacacggaggtgaatgggagcctgctcagaaggaatattgccagcgggtgtggtggtgcgtgtctgtggtctcaactacttggggggctgaggtgggaggctgcagtgagccgagattgcgaaactgcactccagcctgggtgacagagtgagaccctgacacacacacacacacacaaaaatccattaaaaaaatgatgcttctcattcatttattcttttaataatgtttatcaaagtaagagctgcgtctctttgtgctctgggctatgcccaaggaagccccacagaaggacccaccccggccctgggtgcagggctggggtcgtagtcatggagttcttgaactgccttagaggaccatgatgagaacttagccaggcagagcagggagaaagggcatcccaggcggaaagaacagcacgtgcagaaacagggtggcaggaactagtgtggattcctcttgagagccgtggccacccgggcgcttcctgtagacgctgtggcttgcagagtacttctgggcaccttccaacctgcattaacggctggcttctttgggccgatcctcaggcttcccctggtcagcctgtctctggaagccacacttttgaatagcagtagctgacatctattatacattaacaatgtgctgcactcgacgttttccatacagtatttcatctcaatcctcctcaggcctagaaggaggtactcacatcatgcccattttagagataagtaaatagacttacagagggaaagtaacttggctaaggtgaacttgaaccaagatgactgactccagagcttccatttttctttttctttttttttttttttttttttgagacagagtctcactctgtcgcccaggctggagtgcaacggcgcggtctccactcactgcagcctccagctcctgggctcaagtgatcctcccacctcagcacccccaagtagctgggattatgggtgcatgccaccatgccgggctaatttttgtatttttagtagagctggggtttcaccctgttggccaggctggtcttgaactcctgacctcagctgatgcacctgcctcagcctcccaaagtgctgggactataggtgtgagccactgtgcccggccagagcttgcatttttcttatcttcctttgctgtcttctcttctatctctttcttctttcccttctggccttcctgtgctgtttgagttaatcacatgtcagatcatgagcgataataactgaggctcatggcgtatgctcaggcaagtccccttgtttcccctcttcattcccctaggtgcccactcttaataggctaatatgtgtccttccaggacaccttccacttattgtaaatgcatggctacccttaaatatatataatattctttgtgtgttttaagtctacataatgagattataaattgcctgttcctcttctttcataggtgttgaggggggtaaagggtaattgccttaatttttattcatttattttttttgagatggagtttcactcttgttgtccaggctggagtacagtggtgcgacctcagctcactgcaacctctgcctcccgggttcaagcaattcccccacctcaccctcctgagtagctgggattacaggtgcgcacaaccatgcccagctaatttttatatttttagtagagatggggtttcaccatattggccaggttggtctcaaactcctgacctcaggtgatccgcccgcctcagcctcccaaagtgctgggattacagatgtgagtcactgcaccgggcctgtcactatcaatttctaatgcttatcagtttctgtgtcttccttccaccacatctaaaagccaaaagtggtagggtgcagtggctcatgcttgtaatcccaaaatctacaatttttttttttttaattagctgtgcaaggtggcacatgcctgtagtcccagctattcaggaggctgaggtgggagaatctcttgagcccaggagttcaagggtacagtgagctaggatcaggccacagcattccaacctggataacagcgagagaccctatctcaaaaataaatacataaatacaataaaagccaaaagtgccttagttatttcttggagcttgccgaaggtcatctctttacttgctcaagtattcagttaagagagtctttgtgtagtaaattttctgatgtctcaggatagctttatttcaaggccaggtgtggtggctccagagagcaggaggttcacttaaggggtgattaaaacaatctgtggtatgcctgtaatcccagcactttgggaggtggaggtgggcggatcacttgaggtcaggagttgagaccagtctggccaacatgacgaaaccccatctctactaaaaatacaaaaattatccaggcgtgatggcgtgcacctgtaatcccagctacttgggaggctgaagccagagaatcacttgaacacaggaggcagaggttgcagtgagccaagattgcaccactgcactccagcctgggtgacagagtgagattctgttggaaaaaaaaaaaaaagaatagctttattttacactcagatttaaatgagagtttagcagggtataaaattctaggttccttcaacacgtcaaaacttactttcttgtcttcttgtgttttgctgctgaaagttccaagtacctgtgatacgtgttcatttataagcaatctggattttttttttcagaaaacttagaattttatcttcaagattctcaaattttacaaaatatattaaactgtgggggtctttattttctctcttgtttggcctttatgagaaagctctcgcctcctgcccctcaggaaacctccaacgcctttctcctgtcatttccttttctgggctgagtacgtgacacccctgttgtcagtgtggcacccatgggtggcaggtggcgtggggcacactcggctgtcacagccatggacctggccaacactaatggcactggtgcctccctgccccccggctcgctgtggggagtataccacaggggtgtgcccaggacagtgtttagagaaaagcaagtaaaagcgaagctctccctaagcctatctcctgtctgaggtgaatgctcccactccctgccgtgtctcctcccacactggggtcccaccttttctctcccccagggtttttcatagtctgtggagtcaggttttagggtccgtcaagctccctctgagccctcttttgcagccccgccagcctggggtttgttgagagagaggcgccccttgccacctgagcgggtcctctggaatgagcaggtggaagagactcttctttcccatgctgatttcatcccttccttttgtcttctctgcagtcagactggttcttcagtgacgaagaggacaagggagagagagtaagtgatgccgcgggctgggctggcatgggggctggtctggggtgagccccagtccttgggggtggggcaggcagcgggacttaagccggggaaggtgtctgtccttgaggcttccctcaagtctggtggaggaaacacagaccctctcctcaggagcccctagtctgatagagaagcacaaagcttgccttcaggaatccccagtcgaaatgggggagatataggccttgctcagagggaacccagttcaggagtaaaggcagctcctgccctccaggctactgagaaggacttaggttggaggagttccagtctggtgcgggagacacagctcctgcccctagctgaaggggccgctctggccttcgcggttcccaggtgttgaggaaggcacaaaactgtctaataggggacatgtaggaatcatcctcaagagcgcccggctgatgagggagacggtccctgccccagtgagcccggtctgatggaggagacatgggctctgtcatcagggcacccccctctggggggttggcagcccagcatctgagggcatgccagctgacccctcctcctgttcgcagacccctgtgggcgacaaggagcctcaggcagtgcccaacattgagtacctcctgcccaacattggcaggacagtgccccctggcgacccggggtcaggtgagcgcaggggcctgggagtggggaggcgggaggttggacactgcattcctgagggtcccaggtgcctggccagatgcccagcttccctgtgccaccccagcggggccctcccctgccggccaccatggagatggggctgttgggggccttctccctccctagggaagtccagcttgccccgtgcccacctcctgtctgcgcagctgccccgccccgggcagggtcggagctttgttcgccctctctcactggtttctttcctcagcctttaatttctcatgggctggctgtgtccttctgggcatgttcctctttttaatttttcttccttttctccttgcacccccgcctctccctcctcttctccccgtgctctcctcccacccccttctcttctcctccccctcccctcctccagcggacctgttggagatttaaagggtacagtgcggtgtcgcggcctcggtcactaacagtggcgggtgattataagaaggctgggtgggcacagcggcaggcagaatgtcccggactgtgaggaccccacgctgacatgccagttacccctgcctgttatccacttaccccagcagtccatgcccctcccattctaaagccccttctcaggaggaaggaggcactcactgggcccagggccctccccgttgcctggacacctgggcatcgaattgctgccctcctgcagtgccacagaccctgcggcctctctttgccgagtctcaccactgctagtcatccaggctggggaccgacactctctggagaccagcgatgccacgcccagaagcttctctttatctctaactcctgcctcagtcaccccaatgggccgcctcttcctgcttaagaaaccggggccctaagtcctgtttgcagggcctgtggccctctcatggcagaggacagatgatttacatgctcagagacagatgagggccactccctttgtggctgcagccactgactcctccccccgccatggttgtccctccctttagttttagcatttctgttcgtctctgacagaggcacacaggagctccctagtcaccagaggcaggctcaggaggggccagaagacatgggggtgggacggcagagagggaccccatgtctcttctaatcacccgccgccccccgcgccctgtgtgtcgtgtgtggtcgcccatcttgcttttctcaccttgtgcagggggaggggtccggagaggggggcgtctaacttgcctgccagagagtgtggattaaccgcacctgcccactaccctgtgggaccccaggaggcccttggaccaacctgctccttctttagccttggaggggacccaccaggacgtgtttctggttccttctccaccccagtgatattaagggagtgggacccaagtcccatagaaatcatgcttttggtctccttcataactgggtgataactggggaccctgcccatgaggcagggtgaccccaggtccggaggtggaacctatcaaggctctaatcaccagcccactccacctcctgcgtcccacccacttcatttttgcccttttatccattattcatgtggtccctcttctctgttgtgtgctcgggggtggatgtagggcacccacctctctgtgcactgtgtggtctccatttctccagagcatctgtgatttgctgtgtttcactgtggtggtttccatggactgcacctgatatttggcattttctctccagtgcttcagagtaacagggacgggcggggaaggggagaggaaccaggctcaaagacaatgcccccttgcccttagccatcggtaaatgaggggccagtggctggcagcctgatgtcacttcctgcctctagaggaagtggcagttaacatcattttctcctccatccctctcccatagatggacatcagatgtccatcatactcctagggcctggggagatctcatgtttcagaattccctggtttctgaagcctttgaggagagggaattgtgtgcataagactcagctttcttttttcctgatgcaactttcatttttttttctgtctttcaccaacagattctaccacctgtagttcagccaagtccaaggtacgtatgaaggcaattctgaaggcttgatccctgtacaaggcagcccactttggtttttgttcaagggaattgagggaatggcagttggaccatggggaaagttgatggtccctgggagggaaggcaggaggtaccgagtgcccaaggtaagctgagaaattgcttaccttggcagtgtttggtgaggcatctgctgtagtagaaggacctggcctgggagttatgtggctaggaggcaatgtcactcagtagttagaagcacagactctgcagtcagacagtcctgggtttgagttctggctccaccatttagtagtttgggacattgggcaagttacttaaccactttctgatccttagcttcctcatctataaaatgggaatatcagtaaatctgtggggtgctataataaataaaacagatatcctttaaggtctttggagagcctaaagcaagcagaaggaaataaagagaggagcagaaatccatgaaatagaaaacagttgaaaaaaagcaatgaaaccaaaagctggttctttgaaaaaaaatcagtgaaattgataaacctctagccagactaacagaataaaaagaaagatggcacagattatcagtatcagggatgaaagagggacatcactacagacccctaagttattttttattttttatttatttattttttttgagacggagtcttgctctgtcacccaggctggagtgcagtggcaccatctcggctcactgcaagctccgcctcccaggttcacaccattctcctgcctcagcctcccgagtagctgggactacaggcgcccaccatcacgtccagctaattttttgtatttttagtggagacggggtttcaccaggttagccaggatggtcttgatctcctgaccgcgtgatccgtcccccttggcctccgaaagtgctgggattacaggcgtgagtcactgcgcctggctatagacccctaagtaattgaatttatgggcataaagttgcccataaattcaataacttaggtgaaatagaccaattctttgaaagattcagactgccaaaactcacttaagaaaaaatagataacctgaatagtcctatacctcctaaggaaattgaatatgtaatttaaaatcccccaacaatgaaaacttcaggaccagatggtttcactgttaaattctaccaaatatttaaggaattttttaaatttttaaacaatttactttaataattttaaaatattctaaatagaaaatagtataattttaaatattgatatatttaaatagttatttaaatatttgaattatttaaatgttatttaaatagttatttaagaaataataccaattctccactatctcttttggaagataaaagagggtggctgggcaccatggctcacgcctgtaatcctagcactttgggaggctgaggtcggatcttgagatcaagagttaaagaccagcctggccaacatggtgaaaccccatctctactaaaaatacaaaaaaattagctgggtgtggtggcatgcgcctgtaatcccagctactcaggaggctgaggcaggataattgcttgaacctgggaagaggaggttgcagtgagccgaggtcgtgccactgcactccagtctgggcgacagagcgagactccgtctcaaaaaaaagaaaggaaaatagaagaggaggaaacactttccaactcatttatgaggccagcattaccctgataccaaaacctaacaatgcttttgaaaaagatagggctaattcatttgataataccacaaatacttgttgaacgtctactttatatcagtactgtgctgggtactgaaaatataaataatgagccaaacagataggttcctgccctcacaaagcttatcttctaatgagagacagacactaagcttatgaagaaatagactatctgtctggcaggtttggaggcacagtggaggcagaaaccagatggaatgagctaataaagtgagggagggaaaagcgcatacgtagaccactcttgtgagaagtccgattgtgaagagatatttacagaacaaaaatggaaaaatatgtggcttgagggaaactttcattaaaagatgaaagcagccaggcatggtggctcacgcctataatcccaacacatttggaggccgaggcaggaggatcccttgagcccaggagtccgagaccagcctggacaacatagtgagacctcaactctacaaaaaatgcaaaaattaaccaggcatggtggggcatgcctgtagtcccagctacttgggaggctgaggcaggaagatcatttgagcttgggaggttgaggctgcagtgatgagccgtgatcatgccactgcactccagcctgggcaacagagcaagatcctatctcaaaaacaaacaaacaaacaaacaaaaaaagacgaaagcacatatttacttgccaatgggaatgatccaggtgagagacagagagagagaggaagagctgggcccagagcccgtgaagcagcagtagcctgtgctcctagcagatgcatccccaggtgtagtaggaagagagggaggtggcaggggcacactggcaggcagtgttggcagcaggtcattggggtcactcccagctgatggctctttcctcagcgaagtggaaggtgaggacctctgctgggcgtgaaggtggcagggaaagtctgagcagagtgaaggaagtctgaaatgggtcccatgaagcaaggcagatttcctgaaggggccgagaagcatcatgggcaggccgaggcctctgaaggctgcggccccttctcgagagccagcactttgcccagcagccgtgccccgcccctttgggcctggcttctccacactccccggagagccccttctgagtcccttctggccagaagatgtcctcatttgcttcctgtgaccccaccgtgtctccagtggactcaacactgacctccccagagctcacaggccactgcctcccggaagcctcctggcttgaaattccttcctcctgagacgctagcagttaccgcttcccagtctgggcctgcctgactcctgcattaacctgggaactcctgcaggaggccttctcaatcacagggccttgaacaatagaacgtgcttttcagagagtacgtctttactgtaaactgactcagagacttcactgtgacccagtgagttcatcacaatcactagcatgagatgaaagaggagggaatgcacatttactgagcacctactaggtgccagccagtatgcagataacttttcacgaacatcggtttcatttcatttttacggaagacccttgaattttgtaccatccccattttacagatgtggggaaccaaggctcagagaacttaagtaactagaagtttgggcatattcttgggcctcaggcaggggagctggttaggtggcctccttccttggttggtgctctggtatctgagttctgatcctctgttctcaggctctgagtgtttcttgattttctggcacagggactggctctgtcctgagcctgagctgaaaccaaccggccaagcctctaagaaacggaggcacagacgaggctgccggtctattaagtacagcgataggaataactgttgcagggacagggacgttgagttgtgtgtgccgcagtggtctcagtctcatctactggggagaccaggaatcggagtcagggaagcaggaggcaccaggcatctgagagcctgcggcctcctgtcccggctgtaaggaaggggctgcctcgggcaccagggcctggcctcccgccaggctgtgagctctgagggtgggcacaaatcctgcaagtgccggacattcacgactgccagcctctgtctctcttgcctgactctaaaacccaggtctgtgatggtcaaactgtgttccctggagccaccatggggttgtgaccaccaacaggtgtatgacaggaccaagcgtgcagggatccaagctcccacggcctccatctgagccactcttggttctgtctcacattgctgggtctctagggaggattcgatttggacagagtgctcccaagctcatcagaaaccattgttctagatgtgacagtcctgtctgtagacgttctccaggctgtgtccaggacacccaggcggcgtcggtgccccaagttacagccacattctgatcttgcctccctgtgtggatggtttaggctgtcccgggtaggagtgtggccaggcacacatggcagtctctcagctccgtggtgggtggagtggagctgttcattactcagaagcctcccttatcatctttttttttttttttttttttttttttttttttttttttttttttttttgagacaggtcttgctctgtcacccaggctggagtgcagtggcctgaacacagctcactgcagcctctaactgctgtgctcaagtgatcctcctgcttcaacctcctgagttagctggactacaggcacacaccaccactcctgcctaatgtttttgtattattttgtagaaatggggtcttgcttctttgcgtaggctgttcttgaattcctggcttcaatggatcctgctgcctcggcctcccaaagtgctgagattacaggcatgagccacggcaccccactctccttatcatcttaattccaagttcttgaggaaggggaccacttttgtcttctctggtggtccctcacctactgcttagctttctttacagcctgcaataatccccgagcacccccactggtacagggagaagtctagctcctgaccaggctctgatttccccggccctgccctattcaagttcctcaaattccttgaccccaacccttgccccataagaaacctccccatgaccctgaccctgacagagaactggctgtgaaaatttttgcattgacaacagatattggaatgcagggattccctatctacttcaggcaccttcaagaatcagaggaggccaagcatggtggctcatgcctgtaatcccagcactttgggaggccagggtggggagatcacttgaggccaggaatttgagaccagcctggccaatatggcaaaaccccgtctctactaaaaatacaaaattagctgggggtggtggtgcacgcctgtaatcccagctactcaggcggctgaggcaggagaatcgcttgaactggggaggtggaggttgcagtgagccaagattgcaccattgcattcccagccttggcaatagagtgagactccgtctccaaaaaaagaaaaaaggaaagttatgcactcttgctccagaacgacacctatctacacaaatcctgtggcaagttcaaggagtttatggacccccaaagccaacccagggactccagttaacagcaccttctccagagtattccggctggtaattagcttgtttggcagaaggtgtcagtccagctgtcaataatgcctttggtcatcgctgattcctaagtttaaagtattcaacaatatgaatagttacaatttattgagcatttgctgtgttactgtgcttagaattactaatcctcacaaatgccctgtgagttagagataaaattgtccttattttgcagttgaagaaacagaggccagaagagcttctgtaacttgccccaggtctcacaaccagcaagtcgcctgctccagagcctcccctgtgagacagaacccgttaggagatgaggcctgccctgggtgaccctgcccggctgtgagattagagcttgagggcagggtgtgtataaagtcatctcaggctgctgtaataaaatgccatagctaggtgcctcagacaacagaaattgattttctcacagttctacaggttagaagtccaagatcaaggtgccagtgtggctcatttctggtgagggttccctgcctgtcttgtagatggtagatggccaccttctcacactgtgtccttacaaggcaaggcagaaagaaaagagagcgcaagagagcccaagccctctggtgtcccttctaataaccgcactaatcccatcaaaaggtcccaccttcacctaaacctaattatctctcaaaggctccacctccaaactgggggttagggcttccacatgtgagtttgggaggtacacgatttagtccatagcagtgagtgaaaccagctgatgactggctggtggaactgggctcatttctgtctgggtctctgagcactgcactggccaggtttgtaagcccactccacagccatgtgcttgacacctggcaggtgctccgtgtgtgtcggatgaatacactggacaaaagaaaaaaaggctgtgggcgcagtggctgatgcctgtaataatcccagcactttggaaggccaaggtgggaggatcacttgaggccaggagttcaagaccagcctagccaacatggtgaaaccccgtctctactaaaaatacaaaaattagccaggtgtggtggtgtatgcctgtaatcccagctactcgggaggctgagtcatgagaattgcttgaacccgggaagcagaggttacagtgaaccgagattgcgccacctacactccagcctgggtgacagagggagactccgtctcaaaataataataataataataataataataatgctctagcctggtgcaagggtcccctgtaagctctgcatggagcccctgcctgcacctggacacctctggtgacagagacctccatcataagattgctgtgacagggagaaagttcattatagtgacctacatccaggtccttgtcacttccgtccattgctcctgctggccccctgctttcctgcagtatatcctggattaactccctgatctctctgtgaatctgctgacctctgcattccttggaagagaaatcagtctgacctcgttgcttctggaaccagctgggatgagagggtagtttgatcaggtgatcctagcggcctcttaagtctctcagagagcactggccaggaaagaaagcagtactggccaccatatgctccaggctgatcctagcagtgcaaccacattgcacaactccagggggtgccttctggtgttgtgcattgtgggcaaccatggcccaggagccacatgcctgtgactcctgagtccctgacatgctctggttttctcagaactaattaatgtgagagcaaggacagtggctgcagtggccacaagaggcatctgggtctccattcattattacaccatggctgaaacaagaggtggtctgtgaggaggggttgaaagggcagcgtgaccttgtcaggtcattccagcccaagacaggaaccagtcccagcgtctgcttctacaaggcttcctgtgttaaggggacttcattcaccaattgtttgttcatttcatgtttattgagcacctgttatgtgccatgcagaaacaaccaagtcacagcctttgctcttaaggagctcagagtttgatgaggctgatgtgagaagagctaggagcatagtgagatgacaggaacatagagaagtgatctcccatctcaggcaaagggagggctgggaagtggctgtacagaggaagccatgttcgagctgggccttgtagggtgagtaggagctcatccagcaaatagggcagggggacattaagggctggcagcaatgtaacagtgtaggtcacatcaaaggaagggttggtagggctgtatttccacagtgagggctgtgttggggttggggtcagggcagagcagggcagtaggctgggaaagttggggctgggttatgaagagccccatgtgctgaactggggaacttgtgctttatcctggtgggtgctggggcatgcaagcttctgagcaaagctgggtgaggatcagattcctgcttcagaatggtggctctggaggagagacccgggctggggcaagggtggaggcaggaaaccctattaggaggggcaggagggcccagagagggcagaatgagggcctgccggaggaggaggaggagttggctttgggagccatttcaaaagaatccaggacttggctgtgggtggaggagagagggaggagtcacaagaccgccctaaggtgagcagtgtgaatggaggcagtttggggcaggggtaggtaggatgctgtggttccggataggtgagttttaagagcctacagacacccaggtagaaatggattctcaatgggaagaagagtcccggagctcaagtgagtgtggtgttggacagggaggcctggatagcagcgctgcttgggaatggtattttctagggaacacgaacagagaaggcaaaggggccaaaaacagtcctgggaacactgagtctcagtggggaaggcaggggcggggcggggggcgggcaagaagaacctcccaagaggcagaggagaggccagaagggcggatgaaaaccagcttccagaaggccatgggcggcagcatgggccctcctgggaaagtgtgaaaggccaaggccccaaaacaccacagggtgtagcagtgagggctggttcaggtgagaacagcggcatgaagttgcccaacttggggttggaaatcacagtttgggagcggctccaatccaaaccatgacaccatacgggatctttcagccacttgcaggggcggagctggcggcgggattgacctgggattggggattggcggggtggggagctggtggggtccggcggaaaggggaggacgtgaacttgggcgggttgccctggagaggcctgtagatgctgggcaggtgggaaggcaggtttccaggtggcagcgggtggagaggaggtgggggacttgtggtcagagagcgcccctggcggggatttggggatcagcatgcaggaagctctggtgatgacaccccaggggcgtgtgtgaaacggattcaggctgccaagcgttattcactgtggagagattgtcatcaccagagccgtgtctaaaggatttagccagggctggatacggaaaacagaatggaagggggctttgggagaccagcccacctcacaagaaagagctgagagcctagatttgggccagcgggggtagtctctggacggagggcggcacggggctggaggaggagcgttttatgatgcggccgtgggtgctggccttggctggggcttgtggcgactgggtgccgtgacgtgggggtggaccgggtagagcggggtcggcagggggccgagtccgggcgccccccgcatcctgacctgtctcccacacagggttcgtgggcccccaagaaggagccgtacgcccgggagatgctggcgatctccttcatctcggccgtcaaccgcaagcgcaagaagcggcgggaggcgcgggggctgggcagcagcaccgacgacgactcggagcaggaggcgcacaagcctggggcgggggccacagcgccggggactcaggagcggccgcaggggccgctgcctggcgccgtcgcccccgaggcccccggacgcctcagtcccccggcggcgccggaggagcggccggccgcggacacgcgctccattgtgtcgggctactccaccctgtccaccatggaccgcagcgtgtgctcgggcgctagcggtcggcgggcaggggcgggggatgaggcggacgacgagcgtagcgagctgagccacgtggagacggacactgagggcgcggcgggcgcggggcctggggggcgcctgacacgccggccgtccttcagctcgcaccacctcatgccctgcgacactctggcgcgccgccgcctggcccggggccgcccagacggcgagggcgcgggccggggcggtccccgcgccccggagccgcccggctcggcgtcgtccagcagccaggagtcgctgcggcccccggcggcggcgctggcctcccggccctcgcgcatggaggcgctgcgtctaaggctccgcggcacggcggacgacatgctcgccgtgcgcctgcggcggccgctgtcgcccgagacccggcggcgccggagcagctggcgccgccacaccgtggtggtgcagagcccgctgactgacctcaacttcaacgagtggaaggagctgggcggagggggccccccggagcctgcgggcgcgcgggcgcacagtgacaacaaggactccggactcagcagcctggagtccaccaaggcgcgggccccgtcgtccgctgcctcgcagccgcccgcgcccggggacacggggtccctgcagagccagcccccgcgccgctcggccgcctcccgcctgcatcagtgtctgtgatccccacctcccgcgccgctcgggcgccacccctccctagagcccctttggaaccaggaggcttcaccagcctgcacctcctcttctgtggcccctgggtgcatggtgtgggtggagggcgcagcaggcagtgtctctagttggtgtgctggaactggcagggcagaggagaaggctggggccggactaattgaatggaagggggttccagaggtgatgagcagaagaggagggggcgtgggctgctggggtctgtgtccctgcacacatgcgcccgataggtccttctgagcctttctgtggctgcacttggggacccttgtggaccatggggtgtggctagggaacccctaagtttcagactaaaggaaagatcctgggtgatgctggctttttgcttctttcttctgccctcccacctcagcttgtaagcggggatgtgtgtatgtctggggagaggaggtgtagggtgcgtatgtccatggggggaggggcttgtgtgtgcagtcattgtcccaaggtgtttccagtagcgacttctgtccccctatccccaccctggtccccactttgcgcccccgggctccctgcctttggtgcacacaggatcctgcccgccccccttgccagagccagagaagggggttggggccattccaaggaggcaggactgaaaccctcaccagggttactccccaacatccttttgcctgagtcaccctctaagcgctttaaccacgggcagctgcctgttccccagacagtttttggtggggggggtccagggtcccccttgctggtacctccctcacccctctttttgtttttccatctgtgcctgttccttccacagcccaggcacacagaagcccaccttcttccccttaggaggagggatagtcaacacccctgctgtctctctgtcactcacacactgatttatggggtctgagctgggctgttcctgcaggatggacaggacccagcgccctcttctccccacaggctgtaaatagacttccaatcaccaggccagcccccacacaccctcactcattccagggaagcccaggtaggtggtgaacccgctgccacgtctatcagtcctcttgttttatgcaaagatttactgtaaagtagatttctttccctccctcccccattcttttattgtaaatattgtctctaaatgtgtaacatattataaagaatttataaggatttttaaagatgttttgctcatttacaaaagtgttgtaacagtgttggacaaagccttccaccccatgtccgcatggctcctttcactgtgtccttgacacacctctctggcaacaactaaaatttcctgcttctgaaaagtcctgtcttaaaagtacagtctatatcttggaaataaatagctttcctcaaggcatgagtcagctgtctcacttgttttggagggaaagggccagagtggggctgggagacaggagaggtacctggcccagggaaggagggcgatggggactggaccaaggggtggcaggacggaggcagactttttcctggtgacctttttgtaagtgtcctgggggactggtcaatgacacagggacagatatgagttggaagagtgggtggccctcattgctgtgcgaagtttccaggcacctgctctctattcctacagagcccaggcaggtgcacaggcaccttctcaggcctacctggagcttcacaatggttccagcagtcctgccccgcagacaggaggcttgggccagctgtcgtaggcactccaggcccagataatattgcaaaaggacagaatgggttttgcccgttgtccccttcacatgtgtaagcttacaacatggggtgggcgtccttctgtgccggcggttgctttgtagttgccccagccagtttacaggctgcctctgctgagcctcgcagctttctgtaggaagaccaggtgacagtcattaaagggaatctagggagggctggggcagtggctcacgtctgtaatcgcagcactttgggaggccaaggcgggagcccaggaatttaagaccagcctgggcaacatagtatagtccctccccctcctctattatatatatacatatatatatatatttaaatctgtatatatataaagagaatctagggaggagcccaggagctgggaagagctcagttgctcactgaatcctatgccccaccctcccaagtcgtttctgttgggcaaatgagcttatagcattgtaggctctgccagctccaagggctttacacgtcttattattttttttatttttattttttttgagaccgagtttcgctcttgttgcccaggctggatctcggctcactgcaacctccacctcccaggttcaagtgattctcgtgcctcagcctcccaagtagctgggattataggcatgcgccaccacaccaggctaattttgtatttttagtagagatggggtttctccacgttagtcaggctggtctcgaactcctgacctcaggtgatccgcccgcctcggcctcccaaagtgctgggattacaggcatgggccaccacacccggccaacacgtcttaaatcagtcgtccaacactcttgagcacaccaccattgttttctgcattttatatatgaggaaatggaggcacgcagcagtgtcataacttgcccagcccaagatcacatagctagtaagctgtagaaccagggtaagtttaagtccaaagaaaggacacagagatggggtaacaagcccattgggccaccttctccagactgtagtagactttgagtgagaatggatgaaaaccctgtgctctccttcaaaaataaagtaggaataggcctggcacagtggctcatgcctataatcccagcactttggtaggctgaggcaggg

SEQ ID NO: 36 - DNA, 150211 bp, Homo sapiens
  source 1..150211: mol_type = genomic DNA
ttagttcatgcagtttcttcctactctcgatggtctttacattttggcatgattttgcagtggctggtaccagttgttcctttccatgtttagcacttccttcaggagctcttttagggcaggcctggtggtgacaaaatctctcagcatttgcttgtctgtaaagtattttatttctccttcacttatgaagcttagtttggctggatatgaaattctgggttgaaaattcttttctttaagaatgttgaatattggcccccactctcttctggcttgtagagtttctgccgagagatcagctgttagtctgatgggtttccctttgagggtaacccgacctttctctctggctgcccttaacattttttccttcatttcaactttggtgaatctgacaattatgtgtcttggagttgctcttctcgaggagtatctttgtggcgttctctgtatttcctgaatctgaatgttggcctgccttgctagattggggaagttctcctggataatatcctgcagagtgttttccaacttggttccattctccccgtcactttcaggtacaccaatcagacgtagatttggtcttttcacatagtcccatatgtcttggagggtttgctcatttctttttattcttttttctctaaacttcccttctcacttcatttcattcacttcatcttccatcgctgataccctttcttccagttgattgcgtcagctcctgaggcttctgcattcttcacatagttctccagccttggttttcagctccatcagctcctttaaacacttctctgtatttgttattctagttatacattcttctaaacttttttcaaagttttcaacttctttgcctttggtttgaattttctcccgtagctcggagtaatttgatcgtctgaagccttcttctctcagctcgtcaaagtcattctccctccagctttgttccgttgctggtgaggaactgtgttcctttggaggaggagaggcgctctgctttttagagtttccagtttttcctgctctgttttttccccatctttgtggttttatctacttttggtctttgatgatggtgatgtacagatgggtttttggtgtggatgtcctttctgtttgttagttttccttctaacagacaggaccctcagctgcaggtctgttggagtgcctggctgtgtgaggtgtcagtctgcccctgctgggcggtgcctccctgttaggctgcttgggggtcaggggtcagggacccacttgaggaggcagtctgcccattctcacatctccagctgcgtgctgggagaaccactgctctcttcaaagctgtcagacagggacatttaagtctgcagcggttactgctgtctttttgtttgtctgtgccctgcccccagaggcggagcctacagaggcaagcaggcctccttgagctgtggtgggctccacccagttcgagcttcccggctgctttgtttacctaagctagcctgggcaatggcgggcgcccctcccccagcttctctgcggccttgcagtttgatctcagactgctgtgctagcaatcagcgagactccgcgggcgtaggaccctccgagccaggtgcggcagataatctcctagtgcgccgttttttaagcccgtcagaaaagcgcagtattcgggtgggagtgacctgattttccaggtgccgtctgtcaccactttctttgactaggaaagggaactccctgaccccttgcgcttcccaagtgaggcaatgcctcgccctgctttggctcgcgcacagtgcgcgcacccactgacctgcgcccactgtctggcactccctagtgagatgaacccggtacctcagatggaaatgcagaaatcacccatcttctgcgtcgctcacgctggtagctgtagaccggagctgttcctattcggccatcttggctcctcctcaatttttgtatatagtgaaaggtaagggtccagtttcattcttctgcatatggctagcaagctattccagtactatttattgaataggggatactttccccattgcttattttggtcaattttgtcaaagatttgatggctataggtgtacagctttatttctgcattctctatttttctacagaaattttagggtttataaagtgaacatatacaagctggaaaacaatgtagcaattatttaatctaaactctttgttttatagaaaagaaagtttggctctaggaatttgctgaagattgcataactaattggtagtaggattttagaaaaattgttttcccattcagttagggttgcagtgtaagttcaaagttgttacttcatgcattcacttaacaaatacttattacaggcctactatgtggcaagcagtgctctaaacactagaagtctggtgggtgggaaaatcagaaaaagctttggcttctggagtttatatccttgtggggatagacagggaataaacaaatgaatatatactgtagaaaatgaagaaaatgaagaccaacagcaattggggatgatggttattttagattgatggctgttttagatttagttttcttgaaagaggtggcatgtgagcagacacctcaataaggtaaaggaaaaagctgttggcatatctgggcagaaaattccaggttgaagaaaaagtgcaaaggccctgaaatgggaaaaagactggagtgtttaaggaatagtgagaaggccggggtaggtggtgcagagtgaatagaatggaggaaaattagtgatagaaactggggagccagaagccaaattacacaagaccatgtagtccgtggaaggactttgtattttattctaagtgtttgagaagacataggggaatttcgagtggaggagtaatcaatacgaagtgcctttaacatgtgcattctccctatcatgtgtagaatagactgtggttgcaggggtgggacaaggaggccagttaggaagcgctagtcctggtgagatataaatgtgtcctaggcaagtgtattagtctgttctcatactgctaataaagatgtaccaaagactgggtaatttataaaggaagaggtttaatggactcacagttccacatggttggggaggcctcacaatcatggtggaagatgaaggaagagcaaaggaatgtcttacatggcagcaagcaaagagagcatgtacaggggaactcctctttatgaaaccatcagatctcctgagacttattcactatttataagaacagcacctgaaagacccgtcccacccccatgattcaattacctcccactgggtccctcccatgacatgtgggaattataggaactacaattctagatgagatttggatggggacacagccaaaccatatcagtaaggtagtcatattcagcttcacttaaaaattgatgccataaatgtagttaggttttaatggaaagttcacatttttctagcaaatccacagtcattaagatgttctttcctgcatgtgtggtgggccaggggcagaacacacatgcacaggtatgtgcccatacgtgtttgacagctcaaatgggacattggatctatttgggaggactatttcaatgggaaaagtggatggattcaggctatattttgaatttgaaactaataggactttaccagtattaaatataggaagacagaagagttggggtgcttccaaggtttttcctgaaaaacggggcaaagagtggtaacatttcatgtattgggagtgctggggataaccaggctttgggagagtagtaagatattcaaaaagagtaagtttaagtgttaagttagaatgaaggaattgagaaggtactcagatataccattctggaaatcttgagaaaaacggggactggaaatcgagccatcaatgtctagacaatatttaatgccattggatcacatgagattgtctagaaggtatgcatagaaagaagagatggccaatgattaagtcctggaacactagcaaacagaggctgtgtgaaagaagaggatgcattaaatgttaccgagagggaaggagttaagaattaaacaaatgagtcctgtgtactaacatacaccaggttgttcagcatacaccaggttgtatgctggaagcggcacataaacattagttgtttcatgtattcatttacttaaatacttatttagagagaaaaggtcctttcctttcccacatggaacttagtctttcatggtggaaggtatgccacagcttagtaaacaaaaatttagaaatcagaaattagtaacacagaaaacaataaaaattaaaatgtggatggtcaatgaaaccagtaaagtttgttctttaaaaagacttgtagaagagggaaatccctgtcaaaattgacaaaggacacaagaagaaaaggcaggaaaaaaaaattatgaaagtacgatataagtacaaatagagtagctcttttaaaaatcataagacattatcatgaacaactttatgccaatatatttaaaaagcttaagtatccaacaactacaaaatacacattgattttccaagatagattatcggctgggtcataaaacaagttttaataaatatcaaagaattgacattatacagagtatgttctctgacaaatgtgattggataataaatcaatatcaattatacagctaaaataattcttcagagtttagaaattagcacatttaaaaataatccaatgattcaaagaagaaattataaggaaaaaatattttgaactggatgataataaaacataatatatcagtatttgtgggacagttcttagaaaaaatttatagttttaaatgcttatacttaaaggaaaatggtttaaaattaatgacctaagttttcacatgaatacgccagaaatgaaagaaaaaggtaaatctaaaggaagtagaagaaagtaaataataaatataaaaacaaattttaaaataaaaagaaggctgaaaaatggacacatttaaagtttgttccttgaaaagattaataaattgatacatcctcagcaagacagagaagaaaaatacaaataaccaataccaggattgaaacaagagatatcagtgaagattctatatttattaaaaagagggggtaatatgaacaattttatgctaataaaatttaaaattcagataaaatgaatgaatttctagcaagatacaacttaacaaacttacacacacaaaaaatggaaaatcttagtagcttgccttccttccttcctttctttttttttttctgagacagtgacattctctattgtccaagttggagtgcagtggcaagatcatagcccaccatagccttcacctcttgggttcaagcaaacttcccaccttagcctcctgagtagctgggactaaggtgtgcaccaacacacttggctaatttttaaaatttttttgtagagatgcagtctcactatgttgcccaagccagtcttgaacttctaggctcaagtgatcctcctgcctcagccttccaaagtgctaggattacaggtgtgaaccactacacccagctgaaaatcttaataacttcatatctatttagaacactaggtttgcaatcaaaactcattcgccccctccctcataaaaacaaccaccaccaatagcagtaacaaaatctctgtctcaaatagttttatgaggctagaataacattgataccaaaacctgacaaagatattacaatgaaaggaaattatagactaatattcttaattaatttagatgaaaaatttcttcataagatctaagaaaactggatacagtaatatattcaattgtattaaaatatatttgaatgtatatatgtattacatgtaatccagtaatatatatgtgtgtgtgtgtgcatgtgtatgcatatgtaaaatcacaacaatgacatttagcctgggatggcaagattggcaaaacacttggaaaacaaccagcataattcaccacattaacgaataaataattagtaattgaagtaattgaagtgagcatccttaacctgataaggagtgcctactaaaaacctagataaaatataaatgtttttcctttaaatctggatcatgacaaggctgcctgctcttaccacttccattcaacattatgctacagttctgctagtttaataaggcaataacgatatttaaaaaggcataaagattggaaaagaagaagtaaaaaggttttgctctgtttcccaggtttgagtgcagtgatgcgatcatggcttactgcagcctcaacctcctgtgttcaagcaatcttcctgtctcagtctcccaagtagctgggactatagtgcatgccaccacacccagctaatttattaatatttcttttgtagagatgggggtctcactctactgaccaggcttgtcttgaactcctggcctcacatgatcctcccacattggtctccgaaagtgctgggattacaggtgtgagccaccacatctggctggaaaatacaattttaaagcaatactatttacaatagtattaaaacccatttgttacttaggaaggaaagatgtgcaagacctctgtacttgaaactccaaatcctgttgttattaaattaaagaagacactgagttaactttttaagaattaagtggatcatccaatcaaccatccaatgtttgtggattggaaaactcagttttgttatgatacttattcttctcaaatttatagatttaacaaaattccaattaaaattccagcaagctcttttctgtagaaattgacatgctgattctaagatgtatataaaatgtgaaggatctagaaatttaaaaagaagaacagagttggaggacacctaccacttgatttcaaaacttaccataaaactatggtaatcaatatggtgtggtattggcataggacagacaacttaatcaaaggaccagaaacgaaggtccggaatcagacccgcacatatacgggcaatgaatttttgacaaaggcaccaaaacaattcaatgtgaaaaagcaacttgtgtttgtttgtttgtttgtttgtttgtttttcaacaaatggtcctggaacaattgaatagctaaatggcaagaaaagaacctcaaaccttctttctatagatacaccaaaattaatttcagatggctcaaaggtttaaaaatataagcaagaactaaagggcttgtagaagaaaacataggagagtatcttcacagtcttaggggcagaaatagatttattggacagaacataaaaacataatataaaataaaattttatagattagaattcatcgaaatgaaaatgttcagctcatatgaagacaccagtaagtaaataagtaggcaagccacgaaccaggaggaaaaatttgtaatacgtatatctaacaagaactttaatccagaataaagaattactaaaaattaacaatgaaatgccaacccaataaaaagtagcaaaagccttgaacagatatttcacaaaagaaaatgtatgaatggctaattagcacatgaaaagtttctctctcattatactataatctccacaaggacagagaatatatttgttttgttggtattctttttttaaattttattttactttaagttctgggatacatgtgctgaacctgcaggtttgttacatatgtatacatgtgccattgtggtttgctgcacctatcaacccatcatctaggttttaagtcctgcatgcattaggtatttgtcttaatgctctccctcccctttccccccatcccccaacaggcccttgtgtgtgatgacttaaaggtgagcagaacttagtctggtgtcttagtttattcagtctgctataacaaaataccttagactgtgtagttcataaatgaaactcacagttctgcagggtgggaagttcaagaccaatgcactgtcagattcagtgtctggtgaggacctgtgtctcatagatagcaccttccatgtgtccttatgtggcagaaggggaaacacgcctcctcaagcctcttttataagggcagtaatgccattcatgaaggctgccctcataaccctatcacctctcaacggccccacttcttcacgccatcaccttgggccttaggtttcaacataagaattttgttgggggcacaaacattcagttcacagctcctggtatgggatatgcaaaggtccagggaaggaagcaggccctcccacagagaggcgtctgaatggaaacagagcaagctagggtaggagagaagcattctacttagatggaactcgactggttaagaatctattagacagaactggatttttacatgccaaacaaaagggcctatgtgattatttctagagtacccagaaagcgagtagcacatgcctgagatttcatccagaaatggagaaaagagtaagtccagaaatgttggtttaaatgtccatgggagaaggaataaaattgcttaatgttttcacactaaaaaaaagaaaagaaaaaaaaaagaaaaggttctcaacatcattagttattagagaaatgaaaaataaaaccacagtgagatggcaatttccaccaactcgaacgtctaaaatttaaaaaatattggcaatactatattagcaagaatgtggagaagactgcaactctcatacattgctagtgggaacacaaaatggtacaacccctaccacaagatgccgacttctgtggtccttctttatagttttccattgaaacagtcctcccaaatagatccgatgtcccacctgggccgtcgaacacgtatgggcacatacctgtccatgtgtgttctgcccctggcccaccacacatgcaggaaagaacatcttaatgactgtggatttgctagaaaaatgtgaactttccattaaaacctaaccacatttatggcatcaattttttttttttctatagcagtgtttagtttaatttacaaaatgctcaagtagaatacacatgacaatgttaagcactgtatacagttaagtgtcaaattatgtttcactatagaagtgtgacggcttcacaacacatgattgatatgatgctattaaagaatcagagcagacatgctacatgatttttattttaaaccaggcaggcatttccttctctatattctttgttgcagtctactgtataaaagtcagttggaagtttttgtgttttagtaattttgctgaatttaccattgtcaatttgagattattcttttaaatgttgttaagtccttttcttcccatttacaatttcaactcagtttactaaaattcaaaataaccagtgaaaatacattttcaaagatgctttaatatattttatagtacatttatttgtcattctgtatgaaaacttccttttttttttttttgagacagagtcttgctgtgtcacccaggctggagtgcagtggcgcagtctcagcccactgcaagcttcgcctcccgggttcacgccattctcctgcctcagcctcccgagtagctgggaccgcaggcgcccaccaccacgcccagccaatttttttgtattattagtagagacggggtttcaccgtgttagccaggatggtctcgatctcctgacctcgtgatctgcccgcctcggcctcccaaagtgctgggattacaggtgtgagccaccgcgttatggcatcaattttaaagtgaagctgaatatgactaccttactgatatggtttggctgtgtccccacccaaatctcatcttgaattgtagctcccataattcccatgtgttatgggagggaccctgtgggagatcattgaatcatagtgttgattaagtctcacaagatctgatggttttataagaggaaaccccttttgcttggctctcaattctctcttgtctgctgccacgtaagacatgtcttttgccttctgccatgattgtgaggccttcccaggcacatggaactgtaagtccattaaacctctttttctttataaattccccaatcttgggtatgtctttatcagcagcatgaaaatggactaatacacttacctttcaccatttactctattttctcttttcaaactaaataataatctcttaatttctgtatctccagaacctattattatagtttctggactatgatgaggtgcaataaccatgaatttagtcactttcatgtggaacataaatggcaggaaataaattgtttggaaagtattacatgttttactattcatttactcaaaagtatttttgagctcttattttctccttcttaatttaaaaaacctcaggctgttgaaggagagatcatgtattcatttatttcttagctactgggcagagcaaaaatcaataattagaagaagtgtgttttccatgaaattttacactcaaatcaacattataactgtagtgaaattggcatcacattctaaataagggaccgagctattcttgtaggaaatataaacctggtatgaaaagtaagtgcttatcaataacacttccaggaagcaatttttactccggggcaatttgctgtgcatgctgggtcactgctgagttcaatgcttcagaactttagatgatgaaaatgcctttcttccacattacgtgcactgctgagtttcagttggaagggtccttagagaccacctggtccaacccccttttgctttttattttctttctttttttttttttttaggggacagggtctcactccattgcccaagctggagtgcaatggcatgagcacagctcactgcagccttgaactcctggttcaagcaatcccaccacctcagcctcacacacagctgggacttgtcaatgaaaagagtcaaactcagtaaaatatttgaaaaaaacgtattctgagccaggtttgagtgacccatagcccatgacgcagccctcaggagatgctgagaatatgtgtccaaggtggttgggccacaacttggtttcacacattttagggagacataaggcatcaatccatacatgtaacatatacattggtttggttcagaaaggcaggttaaatggaagctgcgggctttcagatcataggtagaaccaaagattttctgattggcaattgattgaaatagttattatctaaagacttagaaagagtgttttggttaagataaagggttgtggagactaaggttttattacacaagcgaagcctctaggtagcaggatttagagagaatagattgcaaatgtttcctgtcagactcaaaaagtcttttctatgagtaattccaaaagggaggagggtataatggagcatgtctagcacccccttcccatcatggactgaactggattttcaggttaactttggaatgcccttggccaagagaagaggcccattcagatggttggggggccttagaattttatttttggtttacagactataggtatgcaccaccatgcctggatcccccttatttttcaattaagaaagcactccagggtggttaactacttacgcaaatattacagagttatttgagatttgtgataagaatctggtcttgcaattcttggttcattattctttcctttactgcaagtaggtaagaagataaatcatgggtatggtttattgtcagtgtcctagggtgacagagaatcagttttggggaaaataggttaattacaaagctttccagaagacttgttcctcagaaactaaattacatatcttcttttcctgctcccaatcattgcctctcatgcaggattaggccaagcaggtgggaagagaactgaatactagagggtcttagagaaaatgaagtttagccagtcattcatagaagaggaactgaaacttatttcacagagaggttaagcaaccttcattctccctttagtgaaagaggcaaatattctttagaaacccatgtgacagcttcgttctcttgcagctgattttgaatcttgcagttaatcatgatctctgggccatgggccttattgtcttgaggctctcattttactgattgataaagcagaaaaacagagaagtggtgtgatgtggcgagaaagtgctagcaggaaatgagatagctattaccacccagggctctcctgtttctctctgcaagactcctttggaaatcttgcattgccttcccctttctgagtaattccgcggggcttcatttagattgtgctcatttgcattaactctcataacgaagaggtgtattaccaactgaaatggaaaaaggcctgtggttactttgtgtcttctctgctgtctctggtctctgggaccagaactcatcctcagtaccgagagccaaagaggagctgaccatggattagatgaaataaggtactgtgtacctgacacccaggaaatagtcagtgtttcttacctcctagtattgttgcaaaatgaagcagaatacagtatatcttttgattcaaaggtgtcattaggccttataactattaaccaattaacaggttaatattttagcttgcacttttgctttaaaatctgaatattgcatgttaatttaaaatatggtttgttaggagtgtggtaggaatataacttgtttgaaattgacatcaatgtctaaaatgaaaaaccatgcatcccaaaacatggtgattaccagcggaaggtcaggaaaacatgcttctcttctgcagatggaggtacaatgaggtgtttgacaggggcttatgttcccaacacacctggcctggactctgcatggagaaaaaggtttgttcactagactgagatttcgaagggtagagtatttgtagagagaagccaggtctccagtgttgctgggtttggggaaagcctgtaatggattcaggtgtccaggtgagaacagctttctgacaaatgtgctgctgagggtgatgttctctcagcacgtggcctgtgagctctcagtgatgctccagccagcaggagtacaccaataagcctgactctctgccaatagctggggccagaggtctcgtcctcatttttcactggtacctggcaggcaaaattcctatccaggagggaatggtagctctggacagttgtataaatatgctatcaaaatttgagaggcagaaagcaaatgacaggaggccagaccctccttggagtcatcagtccactcaaagtccctagaccccttgctcaataatttcactttagtccacataattccaagaggactaactaaggttttcattacagtggtctcttctggcagtaagggtctgctcaaatagctctagtggacagaggccacagacatctgttagtgccaacctcagaaaatcccactataagtttctgttatatttttattttttcaatgaagctctttacctagacacaaaggtgatggagaagtgtttcctccctatcaaaaaatactttgaatttttcaaagaaatttcattttccttgaacaatacagacaaaatcaaataatgcataagcactcataatctctgaccctccctttgcccataaagaacattctggaaattctagcattgttaacttggtacttcccttacactatcctatccttcctaccttccttctctctcctctattctactctccttggtggtcatttttattattatgaggtctagtttattggacaagaggagaagtgttagctagagaatttatactggaaatgaaagaaaaattacaataaatctaggaatgagatggagtccagaagaacccagtaggatagatttcagggagtattaacttaggagttgagaatgcaaaagagaatagtctcaagtcacttccatctacatggaagatattgagaagggataaactagaagagaggacaagacatttgactatgggttgagtaggtgaatccttaagaaatggaatatggccgggcatggtggctcatgcctgtaatcctagcactttgggaggctgagatgggtggatcatgaggtcaagagatcgagaccatcctggctaacatggtgaaaccccgtctctactaaaaatacaaaagattagctgggtatggtggtgggtgcctgtagtcccagctactcgggaggctgaggaagaagaatggtgtgaacctgggaggcggagcttgcagtgagctgagattgcaccactgcactccagcctgggcaacagtgcaagactccgtctcaaaaaaaaaaaaaaaagagagatggaatgtagttgaattatcttaaattgtttttaatgactattaagttgtctgtttttctttaagtcaggaggcattatttagagtttatgccacagagcagaggcaattataatattcatgttcttcaaaaataaaaacagtgaagctatctttgcacctatgccaaaatcctgcactaagagagaaggtgcacttcttccaataaacagatgtgtgaccagtgccagtgtgggctgacttcatctcatccttccaaatctctcatcttagggagctgggtgaattgactattgtagctgctccttcctcctgcagtaacacttccctttttgctgctgacagtgcttcagaggtacagtccttttccaagaaccaccgccatgccattgccactggtacctctcctcactcaactcctctcctggtggtgctttgaagatggctggaactctagtctttactcagctactaaagttggctgtcttccagcagccttcccaactcctgctgaaagaaggaaaaaggtagaaaggaacatgtgagatggtagagagacgtgcactgttcaatgtaactccacatcttcagcaaatcctgttaaactaaaaaaaaatgatgctgacttctaagtccaggtgaatgcacgacagagacaacacatgcagattcaggagccattggcggggaataccaggagaataactcctggaaatgcacaaaaatcataaggagggctttggatttcaaggctttggaattggaagttttgcatcaagtttacatgtatctccaggacagctgatattggatactcatttaaaagaagacttttcagtacccagttggaaataaagctttagaatccaagtatccctgagggagatgactctggcaaaaatgcacactgaggtataaagaactcatgccattcaaaagccttattcaaaagtacatgtgggagggcagcaggaatctgaagtagaagaggagaagagatgctggtatgggaagggaggtggtgagaaggaaggcatatctgcaactgggccaattaaaatgtgcagcatgtacaggaggtgggagaataatcaaatgaataacaagtattaacttttctgtattgctaagttgtaaacttaaaggagacattttaaaaggatcttaaattctgttcctcaatctcagtgacatgagataatatgcatattgctacatcttttctttttaatgacctataaaagcaatcaggtgtgagaacttgaaattttgtgatctgttacagtatgcgcgttatgaagctcacactcattttcacttttaagtgtctctgttgtttctttagttttcatttttaacattgtacccataaaaaataacatatgttgttgtaaaatgcttttattttctcttcaggttcattaaattacttccaaaaaaatgatttcttagttaaattgtttgaccttttctgttcttgacattggatacatatggccctccaccatctcactgctcccgaagataagaacctataaatgtcagtttgtatgattaaaatgcaacaattccaactgcactgtgaatgtttgaagctgctttgcatttttctaagttcctctgggggaaaagcacctttgctaatgaaaaacatattttcaatatggaaattgcaactggaggcacagcctactgtgaagagttcagacatatttggttaattggtgaacagatttgacagatggctatttgcattggggacaaaggagtcttctaatttgtgctgtgtgtccctgtgtgggattcaagctgtgcacactgctggagtacagacataacttgatttttctggtgggctgatgggatggcctacttcactccgctttgtgaagtcgtagcctgaggcaagagggagccaagcatgaagagtttgaaccagtgaaaagatatatttcccagggggattagggattcagagaacataaagactattccttaaatcttcccttagcttagatccccacatgtccatgggggaataagattgaagggaaaactggaaattctgtaatacaccaggatccagcaatcctgctttgggattcctcattcagcacataacacaaaatggagtgaaccattctcagtcattcctcttcagaacattgcacagatgggtgccctgtggctcgctcactgtttgcagcaggatagcccgggcagcagagatggtcaacccggatgagctgtgctggagcagaggcaggatcttcttggcaatgtgatggtgaccacaagtcaggaaactgctgttgaaattgcctttgcaaacattgtatcagtgagaaaactatgacagtgaaatagatctgatctaatcaacccccatcttgcccttaacttccaaacttcccttggtcattcctgggcttgggctaactttgggagaaatttagtttatagttcaaatgataatagccctccccaaaactaaaccaccatagcaaaactaatgaaagaccaccaggttaggaggatgagatgaggctaaattctgctaagatataggcataaatgattaccagccattattccatacacaagatttgcagcatccctaattactcctgcagataacatcattgttatagaacacactggccttttgaaatgtcttttcagggttttgtatttctgatgaccagatggccccatccaaaccagatactcttgactcaacaggccctgtggccccacccagaacctgactcagtgcacagggactgttttccacaatcctaggattgcatcctcaaccaatcagcagcacccatttccctgcccaccaaactatccttgagaaaccatagcctcagaattttcagagacactgatttgagtaacaaaactccagtctcctgttcagaaattaaactctttcttttccgcaattccctcccccatcttgataacctggctgcatctggacagtgggcaaggagaaccccactgggcagttacactgtgtgcagtggagatttgaaggaagacacagctaatggcagtgtctatggaactatacagataccatgagagtgaaacttccctatgtacacagcccacgaatactacctgctcttacctgctcacactgttactccagaaatacctagactagagtaacagtgtaggcaggtaagagccaggctatttgttttttatatacaatttaactgaaattaatattagaatagcttaaagctaaaatatgaagatacaggatattagaagtatgaatacattcagaatattggttactgagttttatttttaggtagcaggtcaccttgattgaggtcattagggagtgcagaatccaataacagtaaaacatcaatgtaaaagttttgcttctgtttagaatatagaaaacagaaagggaatgtcactctactaacaggacaaagagccagataatctatggaattcttgagtccatcaagatctaaggttgtaaaatgattaggtgacatgaatttgaaagggttacaggccccagtgaggagagataagacatacaaattgggttttagcatggcgagagcatggaaggaagtggtaggaaccttgaaggcaaataaaaagaaaactaaaattttaaggaattcttaatggccaaagggttcctaccacttccttccacttagcatgaatgaatacatactcttttgtgcctgggctcccagaatactaaactgtcatgctaggagtcatgcagctagaggccacaagattctgaacctcgccaattgctcctaaggataatataactattgtaaaacctaacattggcgttcgagatatttttcagaccccacattctgatgcattagctggttccacccagactggttatctggcttagtcagttctgtgataccacttaggaacccactttgaccagacagccagaagaaaccactttgaccccctacaatttaatctttgacctggctaatcagcactctccattccctggtctcctaaacaccaaattattattttaaaaattccagtctccaaatttttgaggagactgatttgagtaataaaactctggtctcccattctgctggctctgcatgaattaaactcctttgctattgcaattctcctgtcttgataagttggctgtatctgggcagtaggcaagaagaacccattttgaggctagagaaagaatgggggctagattctgctaaaacaggttatgagaggtgggggaagagacttggctagcaaaggtggccttgttatgtagatgaaggctgtctcagagagaatagctggtaaacggagtcagactctcaatctctgctggatacagggaaagaaatagaaagggaaggggcgtggctgcattaacagagattctttacagatgtaaaacttccccacttgagacagctttgcaaggccacttctgtcagccaagtggcagccatttcaaaataagtcaaagaaatatattttggggtaaaatatttaatttccctcaatattcatacaaatatagagtcaattctcattattcatggtaattatgctctataaagtcactctaaacactgaattagtgaattaaagaaccatcggtcctagagaaaatatagagttaggttcctatgagtctttggctataacatgtttgtcaactgatcaatatataaccttgttttatatatgtttctatttaaaggcatcttatttaatatatattgttgattttaacattgaattcatggtcaatagcactgtaactcatgctcaaacaaagcttatttaacatatattttctccacaaggcacattaccataaccacccagtgggtccttgcctgctgcctagacagagctgatttatcaatataggcgaattgcaataaagaaagtatttaattcacacagagtcagctgtacggaaaactggagttttattattactcaaacaagtctccctgaaaacttggaaataggggtttttaagaataatttggtgggtagggggtcagaaaggggagagtgctgattggttgggtcagagatgaaaccatatggagttgaagccgtcctgttgcactgaatcagttcctgggtgggaccacaagaccagatgaaccagcttatggatctcggtgctgctaagctgaaccatagagtatggctccgtaaaaatctctcaagcactggtcttaggtttaacaatagtgacgttatccccaggagcaatgtggggagattcaggatcttggagccacctgctgtatgactactaaaccataatttctaatcttgtggctaatttgtcagtccccacaaaggcagtctggtcccctagcaagaaaggggtttgttttgggaaagggctattatcatctttgattcaaagttaaactataaactaagtttctcctaaattagttcagcatatgctcaggaatgaacaaggacatcttggaggttcaaagcaagatggaatcagatatgtcagagctctttcactgtcaaaattttctgttataatttttgccaaggtggtttcattactgtgagaaacacactcacccgtccacactcaaagaatggacccagaggcatgaagaacagcgaaagtgagacttttaatggcggtcttgcaagatggggtgtctggtaggcagacacactgggggcagctacagcaggtaatttatctcctagcacacaagtccttctcccagttcgtcactggttgagtactatggggttacaaacttcctggatgccgcctaagttttatgattccccttataaggttataccccagtccccttccccacttgagtttcaacttcccaataatgaacgtttcttcccttttatgggctgaccgctcctctacattctgttcgcttatcatgactttctaggagcatgagccatgccgttggttacatccacaggctggctgccagtccttagatttatcatgccttgaaaatggaccattcaaaatattttctcacaattacagccttcttgtgcttaggaatgacaggtagcatttcagaactacacttggggatcatttaaaaaaatgataccaccaataaaaatgcaaaaacatagcattaaacagatcgtggaaaggacatgagatcgcgctgagaaaagaaggcagagcattgctttatttaaccttagtgagacagcctattttaatggtgcaggtgtgcagagtttgccaaggcttgagggtaaggcaagagtacctagtaaaggttatttaatctcttggctctgtatgaatacaaggtagtaattatctgccactcagagagtcaagataatctgtatgctttcacaataagaaacaaaacccatctgcttctgggaatagggagggaaataaaactgcctacatcctggacttcactttatttgatgtgaggtgaagtcatctgctgccagagttgcatctcccccatccctattacttccacctactttcctcttcccacatcccctggctggccatctcatcccaggcttaagttggctgttgctgaagagggtaaaaaagactcctgctcttccaccttgcctggacactaggaaaaaaatctttctcctcctggggaaggaacagaaaatttgcttggagtgacatcattcactgatacaaaaactgaagtatgctgccactgaaggagaggcaagaaactggtttgcccaaaacctccctgccaatacaagccagagttttgttgctataaggaggagtagcaggaaacctacctgtgtgttaggccctggacttcgtagaagacaaaggttatctggcactggaggaagacagacaaagagaaagccatattctgtgattcaggaagacagagactgcctaaaactgaggctgaagcagaacagagaaacagcccctgctgccaccatgagcctcaactgaagaaccagcaactaccactgagtaaaagtgagtacagagaccatctctgtgacacaagaggccaggcctggctaaaaactgaaggcagggtggcattattaacaaaaaccatctggaactcaagactgcttaccacaaggtagcaatgatctaccactgaaggaataggaagccagtgcagtggtacactaaaactatagcaccaaaaagaaaaagaaaatccaaactaagctcaattattggctagatcaactcactcctttacacacacatctacacacacacacaaacacacttggtctgaaaaaataactgtgtcaattttccaacataaacattatttaatttactctctaccattctttaacattcattgtttggcattcaattaaatattataagacagagaaaaaaaaggaaaaacatattatcaagagataaagagaacagaacaagactcagaaatggccaagatgttgaaactatcagccaaaggatttaaaataactatgattaatataatacagaatatagtaaaaaaggtggtcagcttgtataggcagatgagaaatttcagcagaaaaaaaataaaactgtaaaaaagtgtcagctgggtacagtggctcatgcctgtaattccagcactctgggaggatgaggcaggaggatcactcgagacttggagtttaagagaagcctgagcgacatggcaaaaccccagttctacaaaaatattttttaaaaaattagccaggcatagtggctgtgcctatagtcccagctaatcaggaagctgaggcaggaggattgattgagcccaggagattgaggctgcagtgagctgtgctcatactactgcactccagcctgggtgacagagcaagaccctgtctcaaaaaaaagtgtcacatcaaatgttatagattttaaaatctgtgatgctaaagaaatatacttcttttggttagaatgtcatagagaagcaggagagaaaataaccagcaaatttgaagatatatcattaggaattactcaaaataagacacaaagaaaataaagcaacagaaaataaacaattaaagaactcaagatttctgaacaatatcaaacatctaacaaaggcagtctgctaagctgaagagaaagacaatatagcagaagaactattggaagagatagtggtcaaaattttttcaaaattaataaaatataacaaaccacagatccaaacagctcaaagaacaacaatacaatgaaaaaagccaaactgttgaaaactaaatagaaagagaaagtcttgaagagaagatagaaggaggggcaaacccatcgcatacagaaaaacaaatacaagaataacagccaactcctcactgggatcgatgcaagccagaagacaatggacactgtcttaaataaaaaaaaaaaaaaacaaaaaaacctgtcttcctagaattatatacctagtgaaaatatatttcaacaataaaggtgaaatgaatattttttaggtgaacaaatcctgagaaaactcattgccagcacatcagcactatgatagaggttaaaaattttttttttaggtagcagaatataatactagatggaaataaaatttggatatacacagaggattgaagggtgatagaaatggcaaatatggtaggaaatcttaaatgacttttattcttctaaatttcttgaaaagataatggactgcttaaagcaaaaattaaactttttgttgtatttataatatatataaattaaaatgtatgacagtgatagcacagtgacagagcaagggaaaataagagtatactgttgaaaggagtttatgctacatgtaaagtggcataatattacttgaaggtagacagtgataagtttaagtactgtagtcctataacaactactaaccaatacataaataaataaaagagttatagctaataatccaataaataaaataaaatagatttataaaaatagcaaattaattaaaaagtgcaggaaaaaaggaacaaagaccctaataacagaatttcaaaatataatttttaaaaacccaacctgataaaacagaaaacagacaaaggcaaattcaaaattacagctaaaggttttaatactttacccttagaaataaataaaatgagtagaggaaaagtaagtaaggatatagaaatctgaacaaagctatcaaccagttttatctactttacaattatagaaaaatccacttacaacgctagaatacatattcttttcaagtgcacatacatcatttatcaagataggcaatatttaaaataatttttaaatgattcaaattatataacgtatactccttgaacatatgcttccattaaagttttaatatctaggatttataaggaacttaaacaattgaacaagtaaaagacaaccccattaaaaaatgggcagaagatataaacagacatttctccaaagaagacagacaagcagccaataaacatgacaaaatgctcaacatcactaatcatcaaagaaatgcaaaccaaaaccacagtgagataccatctcacacaaatcacaatggctattatttaaaagtcaaaaaacaacagatgctggtgaggctgcagagaaaagggaacatttatacactgttggtggaaatgtaaatttagctcagccactatggaaaggattttggagatttctcaaataacttaaaacagaactatcactcaacccagcaatcccattactgagtatatatccaaaagaaaataaattgttctaccaaagagacacacatactcttatgttcattgcagcactattcacaatggcaaagatatggaatctacctagctatccatcaatagtgaattggataaagaaaatgtggtacatatataccatagaatactgcccagccgtgaaaaagaatgaaatcatgtcttctgtagcagtatggatgcagctggaggccattatcctaaatgaattaacacaggaatagaaaatcaaatactgcatgtttgtacttacaagtgggagctaaacattgagtattcatggacattaagatggcagcaacagaccctggggactactaggaggagcagggaggcggtggggcaaggggtgaaaagctaagtgttggatactatgcttactacctggatgaagggattattcatatcccaaacctccgcatcatgcactatactcatgtaacaagtgtgcacatgtatccactaaatctacaagttgaaattattttttaaaaatagaaatgtgtcagaaacatcctcaaataactgaagatgaaacaacacattttaatttatgatcaaagaagaaatcaaaagtgaaattagaaaatgttttgaatgaaatgaaaataaaaaggcaacatatcaaaatttgcaagctagacttcaagtaatgcttagagggaatcttatagcattaaaatcttttttcagaaaaagaataaaaggtcttaagtcacttatttaactctccattgtaagaaaccagaaaaagaagagtaaatgtaataatagtagaaaataatgaagagtaggaaatgataacaacgagagcagaaaacaaaagcacaatagaggaaaaatcaacaaaaatgtaataaaaatttcattatctgaaaagatcaatgaaattaaaaaaactctagctagaaaaaaatagaagagactaggtaaactagtaaagttcacttaagaagacataggtaatctgattagcccatatatatctattaaataaactaaatctgtggttaaacactttctcacaaagcaaactccagtcataggtaagtttattggcaaattctatcaagcatttaaaggaaaaataatacaagtcttgtacaaacttttcctgaaagtattagagaagcaaatagttcccaagttatatgaggccagtatacagtacagactataaccctcatgaagttagacacaaaatcttcagtaaaatattagcaaatcaaatccaacaataaataataaggaaactatatcataatcaaatggagtttatctcaagagcacaaagttggtttagcattcaaaactaaatcaatataactaactctgtcaatggaatagaaaagaaaaatcgcatgatcatcttgatagatgccaaaaaggcatttgacaaaactcaatattcattcatgatcaaagctgtaagaaaaccaggccagaaggaaagtttctcaacttgatataacacatctgcaaaaacaaacaaaaactatatctaaattgtgatgaaaatgtgaatgtttttcccttatgactgggaagaaggcagggatgtccaatttcaccactttttaaaaatatatgtagaaagagacagagtctcactattgctgcccaggctggtctcaaactcctggactcaagtgatctgcctggcttaatctcccaaagcgctgggattacaggtgtgaaccactgctgcgcagtgaatttcaccacttgtattcaacattgtcctggaggtctgagctagtgcaatagtcaaacaaaagaaataaaaggtgtaaagcttagaaaggggaaagcaaaaggcatttttattctcggatgtgatcatctgtgtagaaaatcctaaggaacctacaaaatgttagcagaattaatacatgagttacgcaaggtctcaggatacatggtcaatatataaaagttataattgtatatactagcaatgaaaaattggaaattggctgggcacagtggctcatgcctgtaattccagcactttgggaggccaaggcaggcagatcccttgagcccaggagcctgggcaacatggtgaaaacctatctctacaaaaaaatacaaaaattagctgggtgtggtagcacatgcctgtagtcctagctactcgggaggctggggtgaaaggatctcttgagcctgggatgcagaagttgcagtgagccaagatggtaccactgtaatccagcctgggcagcagagccagaccttgtttcaaaaaggaaaaatatttaaaaaaaagaaacaaggctgggcgcggtggctcacacctataatcccaccactttgggaggccgaggcagattgatcacgaggtcaggagattgagaccatcctggctaacacagtgaaaccccgtctctatttaaaaaaatacaaaaaattagctgggtgtggtgggcgtgcgtgtagtcccagctactcgggaggctgaggcaggagcattgcttgaacccgggaggcggaggttgcagtgagccaagatcgcaccactgcactccagcctggtgacagaatgagactccatctcaaaaaacaaaacaaaacaaaaaaaagagaaagaaacaaaaattggaaattgaaactccaaaaagtaccacttacgatagcatacaacataaaatattttaaaatgtgtaagacctgtataaagaaatctataaaacattgctaacagaaatcaaagaagtcctctattaaaagacagcaagtccctgagcactgacctagagctctctcttaaagaaagccaaatccagtttcagagataagcctgcagatggaggctaaatagctgtgattgatgaatagaaagatgataaattagttaaggtagctacaagtcagaggaaaaaaactgactcatgtcttagcctggtttccctaaagggaagcctttggcaaaggcttgtgtcaatatttcactagggattccagttccagggaatacgagtgaagttagtgagacaggaaaggagagtcaaaatgagggtgcattacctgggtagccattacttgcaatcaagctgactgattgcttgataacatgaaactctctttgaagaagccatatacatgactatttctcagaactttccaattgaggtagaaagggagaatttgttagctgatttctgtctccctccactcaaatttctgccctacagggtattaattcacccatctgtctgagttgcacatgcctaaatatgagagcagtcacactgtctctcttgacttattgccaacaggcaagctctgggacacctgaagaaatcggtggtcacgaggcaagatggttttgagttgtgcctccatagagttgttttggctccacgctgagttggcccaccatcttttcactctgctttcctcattctcattgtgtcagattttatctcagaccagacccttcatgcttgcaagaggctgcagcagttccaaggattgtatctagaaggtttctttctgcattgtcttccttattgaggaaatcctttcaaaatatttccagaaggcttctaattgggtacccttggccagaattgagtcacatgcccatctctaaataacaagtaagagaaatgagattactgtaactgaattactagaaccagggtatattccctgaggcttgtggtaggagcagttttccctgaaatgcatgataggttgtagaggggatggtaaactgcatataattagggttctattaggaaggaagaaaggaggattaagaggatagatagacaacacagagtatctgccatagatttaaaggcaaagatcgaagatcacatggattatgcctgtattctattttcaatagaaaaccaggaacatttttcttcttgaaaaatcttcctgactttaatataaaccatccatctatccatccatccatccatccatccatccatccatccatccatccatccatttatccatccacctatttatccatttttttccacttgtattattttttacacatattaattgccttgatgctgtgaataagcacagaatcacctagaatctgatttatgtgtatctgttgtaagtagactttcatagacgtttcattttgttactaatcttctttcagattctgtgcctaagggatctgtcacacgaagtgcaactagtttagttgttagaaggctattccttttctctgtgtgccaatcaatttagtatcagcatccctgcacgatactggccaagcaaagtcagacactggcgaagcttagcctctttatcaatctgaaggatagtcctgaatgctcatattaagtaggtcgctttagaagttaccaaacatccaaacttaatgacttccttttaaagaaatgacatgtaaaatttgctcatttgatattccttcaatgaccttgtggacttttcaaactgaaaagtttcaaactgaaaagtccaggatgcaactctggacctccacccctccccgacaaatgtgttcctcttcccagtcttcatcctctcagtcaatggcattgaacacttattgcccactgtaagaaaggggcaagcatcttattctccttcttcctcatctttctcttttagtccaacagcaagacctatgactcctatttccaaaaatagatctggaatctgtccctccgttcctattgtggccactgtggtcctcctccaggatctctcccctgagctactgcagtagcttcctcggtggactttttatactccttctcttcttccagtgtattcccttcacagcaatcagggtaatcttttgaacatacaaatcaggtaatgctactctctgcttaaatcccctcatggctatacaatacactttaaataaacttcaaactcctaattacctaggaagccctaaatgatctgacatttgcctatccctacaaatccatctcaacctgtattccctctagccaactggagtctagcattgctggccttctgtattagtccattttcacactgctataagtgtatgtaatttataaagaaaagaggtttaattgactcacagttctgcatggctggggaggcctcaggaaacttacaatcatggtggaaggcaaaggagaagcaatcaccttcttcacaaggtggcaggagagagagaaagagtgaagaaagccacatgcttttaaaccaacagatcttgagaaaactcactcactctcatgagaacagcaagggggaaatccggtcctatgatccaacaggctcccaccacatccctaccctgacacatggggattacaatttgacaggagatttgggtggggacactgagtcaaaccatatcaccttctctcttcctggagcacatcaactgatcttccaaggactctgagaatacccttctctttgccattttaactaagtcagcttcattcccaccctcagatccctccgttggactcttccccccagagtttataagtgcatgacagtgagagttcatgcccatgttgtctaccattatatatctagttctaatacaatgcctgaaacctagaaggcattcaataatgacctcaaggccttcatatctgtgttttctgttctgaagtacccttcctccacatattcacaccacttgctccttcatatcagttccctgagctcctctcccctgtcacctcttccaagagaccttcccatcacactcacccatagctctctttacctttaggtaagccttcattatgtgaactattttatatattcccttaaggaacatgagctccatgaaggcagtggctttgttcattgctttatgtccaacactgaaagtagcacttagaacatagtgatacttcatagacatttgttgaatgaatgaatgtagaaagccagggaatgtaacattaaaatccaaagtgaaattgctgtgaagaagactagaaaataagtttgcattaattgccaattattagcagcgtgagaacagactaatacaaatgcaaactcatttttcaaaaaactccctgatttaaaaattacaggtatatgtataaatatatgtgtatgtgtccatatgtagacacagacacatagtaacaaattataacaaaccagtgtaacaaatcagtatggttttgtagtgtgacagttgactgtaaaacagtattaatatgctttgtaaagaacgaagggttgccggaaggtattatattatgtgtttataatatcttcctagatagaaaaaactatgtaaatcttttgttcccttgtcctatgtgtgctttgactgacccatgactacttgggcaaattttggactgcttcctttggtaggaaataactgagaccatacatttgtaaggcatctatctggccaaggtcatggacatagcctagagccttgaaatcatttttcttggggagctctaactagtgtaaatagtgctctggccaatgacaaccaaccttttagtctctgaatcgacatgaaaaaatctcttcttttgccagggatggatttgatccatagacctcaggactatgggctcagtgtgctctgtgtgtcattcagcactgtgccctggcttccctgccatcatgcacaatgaatggctgtgaacaggttgggagttgttgggaaaggctaagacctgtcttcccagttgatgtggaccggactttcctaccagctcacatttggcaagaagatggccctcgatgtgtacaaagctcagatgcaattttgtcactgggtgggtcagctggctgctcaccagcttcagaaagaatgcagtggaactaggaaaatctttagggacaagaaataagaaagctcaagatgagaaagcagcaagatctttggaaatttgggtatattgctgaaaatctctcggaattgctgttattggttcctgaaaatcttttaggagaataggaaccatgaagaaaagataacataattaataacatttttgttgttgttcgaggaaacaaagctataggtcccatttaaataaccaaacatattgagtcaggttgatcaaccgttctccatttctttccctactaagcctgaataagtgatataggtttaaactatggcagtcagagtttgcattaaacctaacacatagcttcgggaccagagtaaacatgcctcagtcttatttctttgtggggtgggctggagaatctgtgtttgaatttggacttgccacggggaggcccctcttccgttctcatcttttgaatcaccaggttccttgagaagccaagatctgtcttcctagttgatgtggaccggactttcctaccagctcacatttggcaggaagctggccctccatgtgtacaaagctcaggatgggatcctgaggggacaggtggttttctgaaagaccagcagagggagctaagaaacaagagttttttccttttgtcaactattcccagtggttaccgatgtggataaacagtcttttctctaccaggttatgatctggaacatattaaaccaagatccaaacaccccgtaatttggcaagtgagtgtgccttgtgtatcagtcactctgtgcctccctgagccagccatgtggtctttgtctctgagtgctaggaggacaaatgcaacacaggccagtctatgtggatgtctgcactgctttatgatcctcctggggtggaggcaaagagagcagaacccaatcgcattttggattatgagactgtttcgccaatagatttctcctcaattcttttgttctaataaattaaagaatggctttccttaaggtaatagtgttaacccttctgagatgctttataaaagagtctgatgacaatctcttcataaaggaagcagccaattacccagggcagatagcacggggttgattttatgttaggtcagtcagcaaatggaccaatcaggtaatttacaaattaaaaaaaaatagccatagaaaggcaggaaaaaaataataattcaacccagaattgcaattgtaaagagaaaaagaaatgctttttaaaaagtacataaatttgaattctcgaagaaattcatctatgaacagaatccattaaatctccaaacaaatggactaataacaataattttgcactaatggaagacctccagattatttcctgggcattagtggggaatgatgactagaaccaaatggaacataagtattatttgaatcagtctttattcttcagatgtgaatgaaataatgattatggactgaattgggctaaaaataactacagagcttttatttatttacttacagagtctcctgcaatgattcagacttggctttactggcttcttccatagataagcaccagcctaggagctctcaaagttgttccagctaaaggacacactcagcttttggtctacagtgacttccagcctaagtggctctggacactgctggaaccccccgctccatctccctccataaatatgtctctgcagcaggtgagtgacagctccttctcagaaggtcagagtcctcagtcatctggtgatttcacaaggctcaaatatttggtccctgacataaacttggtggctttttctagttcttatataactgagagttagctagggggctgcctgctgcttgagatggaggcaaaattggcttcaactctctaataaatgggcctatggaaagtgaaaaccaagatctctgctacatctctctagtgtggactcaccttatatggttctcagagtcttttctgcctccttggacttccacttcctccctggttgtctaggtcatcctatgtcaaacttgaacttggccttttaagtttccaccacaacaaaatcattcatacagaatgcagccccctccctctcaatggcacccatttaacttgccttcttttctgtgctgaatttgccgaggaaatccaatgtcttctccttttatttgtagtgcattcagctgctttctcttcagccttggtgctgaccttcatgaacatccatggtgctggttgtggtggatgggggaggaatggaggtgaattttcccataagtccttctcaaagtatttccaaaggggaagagtgactttgctaagataaattttggtgcaaaccacaggttgatattttgccaacctcattatgatgattttaactcaattattagtatttattttcattttgagatggagtcttgctctgtcacccaggctggagtgcaatggcatgaattattagtattcttgaaagaatagctactctcacctccattaagctccattcacaacctccatctttttaaaaaatttttttaatatactttaagttctgggatacatatgcagaacgtgtaggtttgttacataggtatacatgtgtcatggtgatttgctgcacccatcaacccgtcatctacattaggtatttctccgaatgctatccctcccccagccacccaccccccgcaggccccagtgtgtgatgttcccctccctgtgtccatgtgttctcattgttcaactcccatttatgagcaagaacatgagatgtttggttttctgttactgtgttagtttgcttagaatgatggtttccagcttcatccatgtctctgcaaaggacatgaactcatccttttttacggatgaatagtattccatgatatatatgtgccacatttctttatccagtctatcattgtgcatttgggttggttccaagtctttggtattgtgaatagtgctgcaataaacatacattagcatgtgtctttatagtagaatgatttataatcctttggttatatacccagtaatgggaatcctgggtcaaatggtatttctggttctagatccttgaggaatttccacactgtcttccacaatggttgaactaatttacactcccaccaacagtgtaaaagcattcctatttctccacatcctctctagcatctgttgtttcctgactttttaataatcaccattctaactggcgtgagatggtatctcattgcggttttgatttgcatttttctaatggccagtgatgatgagcttcttttcatatgttcgttggccacataaatgtcttcttttgataagtgtctgttcatatccttcacccactttttgacgggtttctttctttgtaaatttgtttaagtttcttgtatattttggatattagccctttgtcagatggatagattgcaaaaattttctcccattttgtaggttgcctgttcattctgaagatagtttctttttctgtacagaagctctttagtttaattagatcccatctgtctattttggcttttgttgccattgcttttggtattttagtcatgaagtctttgtccatgcctatgtcctgaatggtattgcctaggttttcttctagggtttttacagttttaggtcttatgtttaagtttttaatccatcttgagttaacttttgtataaagtgtaaggaaggggtccagtttcaggtttctgcatatagctagccagttttcccagcaccatttattaaatagggaatcctttccctattgctcgtttttgtcaggtttgtcaaagatcagatggttgtagatgtgtagcattattcctgaggactctgttctgttccattcgtctatatatctgttttggtaccagtaccatgttgttttggttactgtagccttgtagtatagtttgaagtcaggtagcgtgatgcctccagctttgttcttttggcttaggattgtctgggctatacaggctcttttttcattccatatgaaattcaaagtagttttttctaattctgtgaagaaaggcaatggtagcttgatagggatggcattgaatctataaattactttgggcagtatggtcattttcacaatattgattcttcctatccatgagcacagaatgttcttccatttgtttgtgtcctcttttatttccttgagcagtggtttgtagttctccttgaagaggtccttcccatcccttgtaagttgtattcctaggtattttattctctgcagcaattgtgaatgggagttcactcatgatttggtcctccatctgttattggtgtataggaatgcttgtgatttttgcacattgattttatatcctgagattttgctgaagttgcttatcagcttaaggagatttggggctgagacgatggggttttctaaatatacaatcatgtcatttgcaaacagagacaatttgacttcctctcttcctatttgattatttctttctcttgcctgattgccctggccagaacctccgatactatgttgaatcggagtggtgagagaggacatccttgttttgtgctggttttcaaagggaatgcttctagcttttgcccattcagtatgatattggctgtggatttgtcataaatagctcttattattttgagatacattccatcaatacctagtttattgagagtttttagcatgaagggctgttgaattttattgaaggccttttctgcatctattgagatgatcatgtggtttttgtcattggttctgtttaagtgatggatcacatttattgatttgttgatgttgaacccaggaatgaagccaacttgatcatggtggataagttttttgatgtgctgctggattcagtttgctactattttattgaggatttttgcattgatgttcatcagggatattggcctgaaattttctttttttgttgtgtctctgccaggttttggtatcaggatgatgctagcctcatcaaatgaattagggaggagtccctctttttgtattgtttgaaatagtttcagaaggaatggtaccagctcctctttgtacctctggtagagtttggctgtgaatccgtctggtccttggctttttttttgataggtaggctattaattactgcctcaatttcagaacttattgttctattcagggatttgacttcttcctggtttagtcttgggagggtgtatgtgtccaggaatttatccatttcttctagattttctagtttatttgcatagaggtgtttatagtattctctgatggtagtttgtatttctgtgggatcagtggtgatatcccctttttcattttttattgcatctatttgatttttctctcttttcttctttattagtctggttagtggtctatgtattttgttaatcttttcaaaaaaccagctcctggattcactgatttgttgaagggtttctcctgtatctatctctttcttctgctctgatcttagttatttcttgtcttctgctagcttttgaatgcgtttgctcttgcttctctagttcttttaattgtgatgtttagggtgccaattttagatctttcctgctttctcctttgggcatttagtgctatacatttccctctaaacactactttatccgtgtcccagagattctggtatgttgtgtctttgttctctttggtttcaaataccttatttatttctgccttaatttcgttatttacccagtagtcattcaggagcaggcacagccttcatcctgatacacagaaatgcctggttggagaagggcaaaaagttgaaaatattccttagtagaaaaaaaatgtgcactaaaaagtattttttattaaaatacggaaggaaagaaaaatacaatgggttcagatgggcatatgacaataataaaatgtctcacttcccttcctccccttctctcccagcactcccctgaggttgccacttttggacatttctgcttttagctcttctggtggttagaatcatgacttccctgactgagaggcatgactagccctgagcatgagggtggggcttgtgcgctggaaggcttaacttgaaccttgtgagcaggaagtcaggctagaaccactcctaaagtgcctggggaggatgggacttttcactgttggttgcttcctcaaatccagtggttctcgaactggaatcctcagcactgcctgaaaagttggtagaaatgcaaattcttgggccctaccccagacttatggaatcagaacctttggaggtggcgcccagcaacccatgtgctattttaacaaattctccaggccattctgatgcctgctcaagtttgagaagccccgttctaagacagccaatcaaacaaccaaacaccaccaccaacaacaacaaagagacaaaactcatttcttcttccagtgattggtttggggtgggcacgtgaccctgctctggctaatgcagtgcaatgggaggcttgtttaggggcttccgggaggcggtcgtgctcttgaaaaagatgcttgggaagagtaagaggcattgcaccgggtgctttcccgtgtaggtgagaggcatggggctgctactgccatcttgtggacacactgagtggaggaggtgaaccgagggaagaacctggatgcctgaggaatgaatgccagagccccaagagtaaccatctgggagccatcctactgtggacttcttgtatgatatgtattattttttaaagttaagaacatgttgagtttggtttagcagtgaggcacccgaacacagttccattctggaactgtatctcctcccagacatagataagtggctgccaagaacagctctctgggtaggctgggccataaaagccactattacatgaacaggtgagggcggttgggaggagaaatgaatctacttcactctttattccataggtattttcagtcgttttcacacctgccatttctgagtccggggcccttctggcgccctgccctctttcatccttctctgggccatgttctgagctgttgttccctctgctaatgttacttcctgagtgtaattccatccactgacaggcttccagaagttaatgaaaatccttggcctgcccatcctttcctgtgcccgccattcttcctatcttccttactgccatctatttggggaaagcagagagataaaggagtgtttggcttgccaacttgaatgggaaggcccagattgtttcattgtttgcttttactgagacttggttatcattctcccttttcaaaagaagaaagaaagatgaaatagtggaggaggagagctgcccagcaagattccctctgggacatccatgtaaccctcttggaacatacgctaatgctatggaaatgattcttaactcttcattttgtggcttcttccaaaatgcagaccattcaaggtagatggggacactgtggtgagtcaacttgatggggaggggctctcagagctcctgagtttgccctagattatatctatccttccctgaagcttgggtggacatctttctctctaagaagatgaagaacatgggtccctttgccttcataagtttgtgaaactgaaatttcagttgtccagcacaagcagattgagaatgtatatacatcgttttattcaaaccttcaaccacatgatgttatcttgaggtagcacttacactggtgagaaaccaccgtgggatcttagggtcatctcagataggcgtccttattctactgtataagttttctgaaccaaacttccttcattgtgacatggttttgccacagctggtcgttctctttactctttgatcctggttgaacgattcatgtagattctatctctctttaaatgtcagaatgtgacattcaatatttttcgcagtatttgttttatgtgtattccttaatgtttctgttttagttaaatacagtcacacatcatttaacaatgaagatatgttctgagaaataggttgttaggtgatttcaggtgatttcattgtgcaaatgtcatagaatatacttacacaaaactaggtggtacacacctaggccatatggtacgggctattgctcctagactacaaatctgtatagcgtgttactgtactgtaggcaattgtaacacagtggtaagtatttgtgcatctaaacatatctaaacatagaaaaggtacagtaaaatacaatattattatcttatgaaaccactactgtatatgggatctgtcatcaacagaaatgtctttatgtggcacatgactgaatacatcaaaccttaggttcattgctgtgtgaatcagggacctctatgttaaaaggcacagtatgggagaagcattgtgatctggcccagggtcaggatgttgaggcttttactggctctagaactgagtcaattcaatcttttctttttaagctttagacacttcctctgcaaaagacgataacttaatcacagcctctgacaggtttgtggagttgaggcttgacaagggtgttaggtaaaaactgcagtcttgcatatgtgaagccaaaggtctgagctgtgagcaaacctatcatcaccgctattgagtgacagcagtcactcggcctttcacattccaacttaaaaagcagatgcatattcctatggcttttctttgtataaacactatccataaagcaatggcagaaaagttctggtttctttaaagtgggagtgaaaactaagacatattttaaggtgttccaagtgtaggggtttttatgagtcccccttccacttacccacatgtgaattgacatatttttgccaatataaatttattcttcctttccaaagccattaacttaatattcataaaaagagctctgttttttcttttgcactcatatttcattggtttaagtaacccactttatcatataattagaatagtaagtacggtttatatcatcttggaatgcattagctgggcaacagataattcacttggtgggagtagaagtaaatggtgtactaccagctgtgaacactcagcagctactatgcactcatcaaagagtgttataaagggttacagagaattgggaacttagttaagggcagatttgttaaaaaaaaaaaaaagtatcttctttgccaatcaaatgtgtcccctcaaagtagacctctagagcctggctactcaaagtctgatccagagaccagcagcatcacatcacattttctttttctggaggatctaaggggagaatcattttctcacctttcccagcttctagaggcttccagcattgcctgatggcccctttcttccatctttctgaactttgttttgtactcacactttctacttctacagtcaaatctcttcttacctccttcttataagggcacacttggataatccagcatggcatccccatctcaatatccttgacttaatcgcatctgcaaagtacttttaccatattgtgaaataataagaaatatataagtgtgtgtgtgtgtgtgtgtatgtatagatagataaatagatagatacctagacagatagataggtacatagatacctagatagatacatagatagagatatttgtctctgaccctggttcctgacatagagctcctaaacttttctaattccctaagtggtacgggtactagcagcatcatttgttctaacatttggtctttgagtccagttcctgacacagagctcttaaatttcttggtattttctgggtgataagagtgtcttttattcaaatgaaacaactcttgatgaggccttggatagctttaggataggggcttgtcatcagaaagacaaggccatgattagaagcttagcacttttaattcccaaccttcattctctggggagggcagaagagctagagattgagttagtaatagatcaagcctacatgatgaagcctccaagaaaaaaaaatttccctcaagtatgggttttggagagctctggggttggtaaacacatccatgtaccagaagtgtggtgcaccccagctccacaggaatagaagctcctgcactcagagcccttccagacctcatcctatatacctctttatgtcctttattataaaagaaaatggcaaacacaataagtgtctccctgagttttttaaactattctagcaaattatcaaccccaaggagagggtcatgggagccccagtttatggccagtctgttagaagcacaagtgagaaccctggacttttgactggtgtctgaagtgggggcagttttgaaagactgcgcccttcgtctgtggcacctgatgctaactccaggtagatagtgtcagaaccgaattgaattgtaggacacccagctggtatcagggaattggtcgacatggcaaaaaaaaaaaaaaagaaaaaaaaccccacaaaacaaacaaacaaataagaacaacgcccacattttggtgaccagatgcaaagtgttgaaaatgtagaggaaaaaaataacttttttttttctatatacatgtaaaggaacacattctcatgttctagggattaggatgtggatatcctcgggggctgttattcagcctaccacaactttgctgtcagataccattttaaggtaacttaatgattattaacactactgtttaacaagtgcctgctatgacccaggcactttacatatacatgaaacctacttcttataagaataccccacagtagatattatcaccctatccatgtagatgagaagtctggggttcagaaatcccagtaatgacagagcaggggttggtacccagacccccatgggtcccagcctctgaccttctcttggtacctgactcatgccaccatcataatcacctgttttattcccaaactcagaataaggtacgcctatgtccaggtttgtccagtgacctgtcgcgttcactgatctaaagtccatgcttaaagatttccttttgaaaaggaatctttaatgttacatgaagaccaaattgatggtttcggtaaaaagccagagcaacttcctgtgcactatcagctgactgatcagggttcttttctagaaatcacacacccagtcagggaaggtctccatcttcaaaattacaggagttagacagaaatgctgtcccttggcaggaagtggcttgagagatgccactctaatgggcttccttgataaactgtgccttaagggtttagtggagccatgggatgaaactgggaaaaaacaggaattgcagacatagaaacatttcagtcaaaaaaaaaaaaaaaaagaaaagaaaagaaaagaaaaaagaaaaaaaaaagctcctatacttgctctggaaactttactctgtacagagattaacttcttcttaattatgtagccattatgtagccataatcactttgttgttggtatcatccaaaaggacaagttctggatgcataatggctgcagtctgttttttgccttttcttcaccttcctgattcccaaagtcctacagtaaggtgggcaaaaatctatgtagttttaaaatttgtaggctattttctaatagactttctctacgctagatgttttggggcatttgaaggtgatcccagtagattcctctgcttgaccaaaattatctttcaaaactgaaatcgatttttatctggtgtcaggattataactcccccctctcctacctaccccttaccacaacacaacttcctttcacctggggagtctaagctgatcaaactgcatgtgccattgtttgcacacgtactgggccactgggcaggcaaggaggggctccttaaaccacaccagaggtttttggtccagaactggtcaccaccctcagcatgtcaccatgcagtgctttgtggactgaaatccatctgtactcacagatgtggctgaacgcagaaacactcaaagcacccccagactccaaagccttactgtggcataatatcctcattgctttttccctccttatgtccctggagctacacatgaaacttcttgggggcaacttcaactaatgccaacttgattaacattggaaatagttatgtttcaaataaaaatgtacacaagttttaattgcactggctacctcaaattttctgaacaaagcttttttgcataagagataaaggttggtgacgccttttatgaaattggtccaaactcatcagaactagcaatcaaaaattaattccttgttttattttgaattttatacttcattgtaatgatcgtattgtatatttctgagcattaggtttgcaacaactcatggataaagtatggatttctgacctgacctgtaagcaaattactcctccattccacacctcttttctgtgaaaagggatgacttaatctctgccctatttacatacaaagtcatgatgacagtcatgagaaggaattggatttgaaatggcaatgaaagtcaaagtgttatctttgccagtgtgtggactcagtttacattaaagttacaggttcccaccagctcctcctctccccaggaggtctggtgttctacgtgtaatcactcaaggtgaaccatgactttcatatcagcagtgaaatcagctgctctagttatttcctgttctggcagcaccctgctgagcatctcgtgatttcaggagagtagaagctgggtggtggagcagtccaggtttgtcttaaaaatacagttctccagctgttgtattggatttcctctcacagaaacctaaggtcgacagaggattacaaatttgcctttccataacttggatcccttgctcttctctaggtgtcgagattataactctctcctttcctacctactccttcccacgacaccacttcctctcacccagtgtgtccaagctgatcaaactgggtgtgtcattgttcgcacacttgctgggccatggggcaggcaaggagcggctccttaaaccacaccaaaggtttgtggtccagaattggtcaccaccctcagcacctcagcatgcagtgctttgtggacagacagcgtcctttctcactcttttgagtgaccctccccagctggctcaagttggccttgcagcctgataggccttttaaacaaggaaaggaaggtctctcagcacactttaacttactagttattcagcttattttcttaataagccacaagctctaagggctcttcagaactcctaatttcaacactggaaattattttcttctctttattaagaatttgcagccaggcgtggtggctcacatctgtaatcccagcactttgggaggccaaggcaggtgaatcacttgaggtcaggggttcaagaccagcctggccaacatgttaaaaccctgactctactaaaaatgcaaaaatcagccaggcatggtggcacatacctgtaatcccagctattcgggaggctgaggcaggagaatcgcttgaaccagggaggcggaggctgcagtaagcagagattgcaccactgcactccagcttggatgacagagcgagaccctgtctgaaaaaaaaaaaaaaagaatttgctacattccagacactatattgagtgctttttatatataagaagtaaagcttaaagaggttaagcaacatgcccagggtcacccaggcagtgagctgaagaggtaggatttgaacccactctggctcgagggcccatgtctcaccctagctcaggctcctgaacctcccaatttttccccatcaagctgggcacatgagccctcaaggacagctttgcaaagcaccatgcaaagtgcttgaggcaaatacgagtgtcacttggtgcagacaccctcaggccaaggtcaacagccacataggctccccactctccaaacgggagaggtgcgctaggtctggagttcagctggaaacacgtgggcctgtgctccagcagagggctcccatcacctctctgctctctttttttatgaagcaagggtgacagcgcctctgttttgcttcttgaaccggccattccagtgctcatttagatgcaccggtaatggttcataggagtgtagaatatccagcaaattccacgatgctgggtgtggtcatgggaggcagtggtcataaatgaagttcttgctgtgggattgtcagggaatccagcacatgacaaagggagttatccatgatcatagtagtctgtgatcattcccttggaagagacagacaacttcatgccttgagaatgttttcaagaaagtgaagttccctaatcgggggcagggagcctataaagttagccttctagttgtgggccatgccacatcctggtgggatgcagcccagctcactcaaaccacatgccgcttagctggtaagcagtccatctctgtgtcacatagattccctgttgggcttcccagtccttggtggctgtttcatgactgtgctgagtcctgcaggcctctatggtctgttgtataatattatggctcctgcatccagaggcttcttgggcttcttcattccaaatgcttttctcagaagctgtcttttctgtgcggcacagtcccacactgctagctgagaggatggggactgtgagcacctgctaactcttctatccctagtcccagcctgtggaagtgatggccctggtgttttctctagcagagtataccaacgtggaatgaatgatgcctgactaggcctgcagaaggggtcaaccaggcccttcagggtggtttatttcattttggaaggaggaggagagaccctaattgttcaggtgtagacacatctgatactgggaaatgggtgatgtgggagtaaatctctctctctctctctttctctctcggtggggcaggctctcactcggttgccttgctggggtgcagtggcaccatctcagctcactgcagcctggaccttcgggctcaagtgattctcccacctcggctacctgagtagctgggactacaggtgtgccaccacgcccagctaatttttgtcaaatctctctcttctttgaggtctgagtatgacaggacaatggcctccattgatgagccactggggccagagagcagaaccatgcagctgagaaggaccgtcagatgagtgacctctggagctctctggacagcctggaagagtggcttctttcttccagggagaaagcctcagtctctcctggactgggccccaaactctctgcacttcacactggactggccctgaactctccaggtgttaaggagctgacattttcccccaactctctaaacatctggtctctaagcttagactacctgacacctaaatctataatgtttatttatcctgagcaaaacctctctcatactagcccctctgcaacagcagacagctgcctcactggggaagctccacagtgcatgacctctgtgggatgctaagaggatgggactatagccacctgctgaccctcagaccattaccaattgtatttgctgatgttcttcctgagccactctgagtgacaaaaaatatttaaggttgaggaaagaagcctttgacattatttaactatgctccaatggacctctgccctaaacaccagactcagacccagctgcctactgggtggcagtaggatctccatttggagatgtttactgggcatctttggcctaatgcaggcctatctccagcctctgtccagcctgctccttccctgtctttcccatctcagcaaacgggaccttctcctttccattttctcaggccgtgctcgaccttgtcatttttcccttgacttctctcattctgtcacgcctgtcatccaacccgttgggagagcagataagattgatccaggatatatatgaagtattggccacttctcatcaccttctggctaccagcagagcctttgctggtctatattgtgttgcttttctacaatttagaaaaacatcacccccatgactgaatgggtggcagagcctttgagtagagaacgatactccttccttggatggctgaagccccacagttagactctgggctgatgctcagtgccctgactagactccagccccacctatccatgaggctggtgccttgctccctgcatcacctgcacaatcatgcgcagtgagctgagcaggccacgctggtgcagacctgctgtctcactcacctagaccattgcagtcagctctaaggtctccgcttttacccttgccctaccacctttcagtctgttctcaatgcgaggccacagcgatcttttattattttattataataataataataattattgaaacagagtctctctctgacacccaggctggagtacagtgatgtgattgtggctcactgtagcctcaaactcttgggctcacacattccccccatctcagcctcctgagtagcggcgattacaggtgtatgccatcctacctggccaatttttttcttttcttttcttttagagatggggcctcaactgtgttgaccaagctgtttagaattcctgggctcaagtcatcctcctcagcctcccaaagtgctgggattacaggcatgagccaccatgcccagcctgattatttaaaagtatacatcaaatcaaggcactcctctgctgtaaacctcactctaagcaaaagccaaagttccagcaaagtcctatgaagccccatacaattcgtcccctattaccttgttgacccatctcttgttatcttccccttcctccttttgctgtgaacacaagacctccttggggtctcttgaagtgctaggcctcctctcacctctggcagagctcttgcactcacacctccatctgctggaaggttctcccacataggtttacctggctcattctcaacctggcttaggtctttactcaaatgtcacctattctgtgaaatgtcaccttcgctgtccaactatttaaaaatgcaatctccctcccctctcccctcaatctgacatttctttcaccccttcccgtagcactttttctttttctccacagcccttaccaccatctaacacgttacatttatttcacttatttattttcttgtctctttcctcattagaacaagctccacaaaagcaggcgttttcatctgtcttcttgttggctgtgttctcagcacctagagcactgcctgatccctaataggtgaacggttcctttatatttgttgaatgaatgagtggcaggaggcagagtgggtctattatgtggaaatatatgagattgttcttgccagtcaaaagctgtcaaatattggcagcttcacgtggttcaaattaatgtaacgtaatacagaacaatggccaaaaggaggtgttacgtgagggacatttgctcctgatttgctcagtgtgctccttcctgttggaaaacatgagattcttttataatcccctgggaacgaatttcccatataaatagacatttcccttcctgagcccatcattcacagagcagccttcttccaggtagagcaccagcagtaataatgcccgtcttggccttcaggcctccagatataaattttttggctatgggacaattttttttggctatgggacacttagaaaaaataaagatcaatagactatcaaactgtagccagacatcagatccaatgccagggaccttggcaaaggtgacatcagtaacgagaggaggtgcctccaactgactgctcagggctgggaggaacaagcctctgtggtctgagcccaggagcctgcaccccatccactgggctcacacagagtgttcagagcccagaaatctcttcctctgccaggtctgcctctgctgagcttgcaaaaaggcatagtcctattgcacaaatcttttttttttcttttcctttctgttttttttccatatacccaagggaatgggaataaaaccttaattttgtgccttgtaaatacagcttttaaaaagatatagactattaaaatccaaataaaaaagatctttacgtttggtgtctccaaatgctatattccaggacgtacatgctgaggcatctgtcagtcaagaccacaagatacagccatccggcctatgcacttagtatttgctaaaagcgtggttactggttgagtgcgtctgcaacacgggggcccacgttcaaatgcctgcacgagccaggtgggaaatacaagcgagtgaaactggctgactcacggccacaaagaaatgtgtttcctcccaatctgcttgacttcaggccatctttttttcccctcacttttggttaagatgtgggtacaaaaagtattatgcttttcttcttaaatctattagaaggaaaatatcaatacaagtgtgaccacaatagcacctggcacagtctcccaggaatgtaaaggtttgtgccaatttagggcacttgatctgcctcagagggtctgcctctgcggagcttccatctgctgattaacagggcatcaccctacttcacaaaggcctgtgttcagagaaacctcccccggctttgtgccatggccagggacctcctgacaaaggtagaccctcaccttctgactctcctggagtctgttcttcactctgacccaaactatgtcaagttcagaaaactgatttctgcctctccctccatccatttatctgatgctcatccgtgaggcagctggaataggattgctccattcccctgcccaggcattgttttaaatccctgcagaaaacaacagctacaaccatcatggtaatgagggatgacggtgacaaccacaacctggagagctcgatggagaaggagagggagagatctggtgacaagtgactctcttcagcagatctaatcactcctagaaagatgtgactgccttttcatgcacagcatcacttaaaagttctagagaactaggcaaggggtaggggaaatgcagctgaagtacatagaaaaaagtctgctggaaatttgaaatgatactgagtacaatgtacatcagaaagattaaatggaaataaggcaaaagtaggaaagtttcagtcaaagttgaaggcttgagttttagctggatgtggtcttgaggaaatgcaggttcagtgggactacatcatcggatgtttcacgaagcaggaattctgctttggaaaaccaaaccagccaataagcaaatgaaaagatgcttaacatcattagtcatcagggaaatgcaaatcaaaaccccaatgagataataacatttcatcctaaccatccactagaatggctaaaataaaaaaagactgatgataacaagtgttggggaatacgtggaaaaaaatgaaaccctcatacatttctggtggaaatgtaaaatggtgcagctactttgtaaaacattttggtggttcctcaaaaatttaaacataaagtcaccatataacccagaaattccactgctatgcccatacccaagagagatgattttttaataaaaaaaaaacttgcttattcaattgaaaataatttttaataaaagcaatgataatgccattttgtcaggggaagataatagtttataaaacttgtgcacaaggccaggcatggtggctcacacctgtaattccagcactttgagaggctgaggcaggagaatcacttgagcccagaagtttgagaccagcctgggcaacatagtgagactccaatctttataagtaatataagtaaacataagtaaataaataaataaataaaatttaaaaaacttgtgcacaaatgttcatagcatcatttttcataatagccaaaacctggaaacaatccaaatgtccatccactaaatgaacagataaacaaaatttgatctatccacacaatggaatattatttggccatgaaaagaaataaagttctgatacatgctgcaatatgaatgaaacttcaaaacatgcaaagggaaagaagccggtcacaaaagaccacatattacagtatatgacttcattatgtgaaatgtccagaacagacacctttgtccatacacaaatctatagagacataaagtggttgcctagtgctggggaaaatgaggagggtctgctaatgggtatggagtttcttttgtggaagatgaaagtgttctacagttgattgtggcaatggttgcacaactctgaatgtactagatcactgaattgtacactttgatgggtgaattgcatggtatgtgaattatgtatcaatacagctcataaaaaacaagcagtcaggtgaagaacaaacatgagaaactgtcttcaaatgcagataacagtaacagagatgacaaaatgaaagacaaggaagtgacagagtggagagctaacatgcagataactgatgctcctgaagaagatcctagagccagtgggctgcaaatcagaaataaagatataagaaactccccctgcactgattccttgcaaaatcactcagacacatcgacacctagacacatccaacccttacaaatgcccaataaacacattaaaaaataactttagttccactatttaataaaaaaagtatttgcttattcaactgaaaatgatttataataaaagcaatgataatgccaactgttagtgaggctctgagggaactgggccctacatatattgttaatggaaacataaaccgtagaactttttcatgtttgttcttcacctgactgcttgtttttttatgagctttattgatacataattcacataccatgcaattcacccatcaaagtgtacaattcagtgatttagcaatttgagagcacatagcaaaccttagtataagtatattcttattcactttcccagcatttctatctctaagaattccccctgaggggggaaaaggactagatttatccagatatttagctataagaatattatgaaaatttatgcatatctccaatgctcaatgacacagggatttgttaaattaattttgctctcatcatataattaaaaatcatgaggccactgatgatgttttggaaaaatgcttaatgacagatactttttcatgacttttttttgttaaaggaagataacggtttataagacagcatatgcaccatttaaaaaatttacaatacatgcatacatacatatattacatgtacacatgagtagaaggtgagggagaagtaggaaaccaagaatgggaaaagttcttattacacattaagtggtaacaatgatttttattttctttttgcttttaaaacacttgtatggtgattatgcacggacttctgtaatggtaaaaataataacgaaagatgttttaagagttctccaggctggacacagtggcttatgtctgtaatctcagcactttggaggccaaggcagaaggatcacttgaacccaggagcttgagaccagcctgggcaacatagtgagacccccatctctacagaacgagtttttaaaaaattagccgggcatggtagtgaaagcttgcagtcccacctgctccataggccaaggcgtgaggattgcttaagcccaggaggttgaggctgcagtgagccatgattgtgtcactgcactccagcctggttgacagagtgagaccctgtctcagaaaaaaaaaaaaaaaaagttctcctcaggctagagtccaacccttcagcaagtgcatcagaccctggccccagcagctcctgcaacttcaactagtgggtatggggcatctttgggggccatacatcatttctgatacttccctaaatgggggccgtatttgtgttttcacagcgatctgccatttcatttgcctggagcgttctcctctcactcccccacctggcttcctgactattgtctcatgggtcgcctttcctgggatgccacccaagcagagggaaccatttcctgctcccactttaccctgtgcatgcactatttttgtatcttgcacggcaagtttacacttctctctcatgactcattggaggattaggctgggttcttaatcatccttcttgtttaatcagcatccaacgcaggcctgtacaaatgtttatggagtaaacgagtgaatgaatgaatgagtctgtttgagctctaggctcacatgagccttgagtgcagaagatctgcactcaagtgccccttgggtccctaaatcaacatgccccaaactaagcccaccgttttctccttgttcctcattaccaatcctcactgtttttgtgcgtgccccatctctgtgattggaactacacccttccagtgacgagctgggatcttgggtgcctcttttttctgctgtaataattctcctggggctatcaattctgtcactcacatgactcctgtgttgttttcccttctttccatgcccatgctgccgacctctctccctcactcttcctctctcttagatatctgccacagcctcctcacccctatcctgttgaaaactccctagtgacctccgttttccccaggatacagtcagaactctttgtcaaggtttacctgccctgtgtgatccagccctgctcagccctgactatctctccagcttcgtttctcctcagccccacccctttcatccttcttaggagcgacctgaagaactttcttctctccgtgcctcattcatattgttggttttgtctggaatcctttttccaacccccttgcctccctaactcatttgtcaagccttactttaaaagacacttcttccaggaacccttccttcactccccaagtccagttaggcccctcgcatatacaccccccctagctccctacactttccccaacatagctctctcacactgtatttaatcgttcacttaattgttcttctcccccaacagactgtaagagacaacagccggtgtcagggcggtgaggtggggaagcagaaaacacgtctgcttgttcacgaacgttcttccaatgtccagcaaaaatttggtccttaataaatccgcttatcattcaacaagccaacagatggaacaatgtttgcttgcgctactgcagatgctaattcaaactttgggaccaggcaaggcatttggctcttcattttatgaagatcagagagagggagcgcagtacccagttgactgaccgagagagagctctgtggtgggggaaggctgctgtgttgggcccttgtggggagtgtgctttccatctgattgcctttccgcatctgcacaactaacttcccccatgggtcacgagtttttccaagactgacaggaacctaccctgaaaagtaaaggaagttccctgcgtgtttcttaatgacaccttcaaaatattttcaacattcctcagtttaaaggtcccaggactgaaattttagatggtgtcgaattcccccgtggagatgctgctgggccgggccagacagctacctctctcacacccgcttaattaagttgggatacgaaaaagagcagtggtgtttgggtcaggcaggcagtagtgcaatgtctccaagtagctgagtcaagttcagcggaatccagctccctggggaggctggagggtagctgggtagactgggtgagtgtggtggattggagtcttgatcagcaaacactccggcccttcttccacccctccggcccttctccctccccactgctgctgaggactgggtgtacttccggcctcactgactttgagcttggccatgtgacctgtgttggccaatggaatgtgagcagacagggtgtgcgcagaggcgttaaatgcgcttgcaaggttcttctctcttgtgctcctttcattcctgaagacaggagtatacaccaggtcaccactgttccttcagcctcgttctctggatatacagtttggatacatttagtttgagatggctactatagatctaagcagagatccatgtgatttggagttcagggggtctgggctggaaatacacattggaatcatctgcaaatatgtgacatttaaagccttgagacagatgagctcaccaaggtgtgagtgtggatggaaaaagagtccagtcgagtcttggtttccttcaatatttagaggtcagagagatgagaaggaatcagcaagaaaacagacacggaaaagccagaaaggcaggcagacagccaggccaaccatgggccgtgggagccccatggacagagggctcagagttggagagagctatcaaatgtgtccgacactgctgatgggcccgtgagatgaagatgaagccctgacctgtgagtttagtgacagggaagtcgtaggtatccttgatgagaatatattttgtggagtcataggggcaaaaacatcaaccaagggattcgggagagaataagaggagagatatttgcaagttagacaattcttactaaagcttggttcagaaatgaaggagagaaatgggactctagcccaagggggtggtggcatccagagagattttttatgggataaaaaatagtaagtttgaacgctgacaggaaggatcaaagagagagaagaaattgatgatgcaatagggatgggagagtgttaacagccagttcacccattgtaccaagaataaggtcagggatacagcttgcatgcaggtaggtgagcagatagagtgagggaagcttgtggacattctctttcagttacattgattttctcaatgaaacgggaacccaggtcgtcagtaagagtaagcaagtggcaggtgaagaagaaagtatgacagagtcatctaggagagttggagaatgaatggagcaaggcgtgcagcttagatgctggctagcagtgactgttctgagcactttgtactggcttttctactaaagcctcacaacagcctatgaagtaagccctattatttgccccatctacagataagaattgaagcacaaagtggtcaagaaacttgtccatagtcccacagcaggaaagccaggatttgactaccagtgatctgtttccagggcccaaatgcttaagcactaggttaggctgacccagttaaacatgaaagcttgtcacagaactgaactaaatagaatagaataaaggttgaattaatgtgtgtggtgcaaccactctgtgtcaagctctgcactagattcctctgcaaaaaccctttgagttgtggttattatcaaccccattttactgatgaggacattaaggtctggaaagattcagttgcttgttcaaaagttgaagagctagcaaatggaagcccacaccatgtatacagcccacacaccctgattctaaagcccacaccctgtgtacaatgccaaagaacccttaggatatgtgagtgggtcgacctagcttaagttgcttcattaagccaaatacatcaaaaccctccctacatcaggctgagatcacttgcaaactttatcctgagcacctggagagcttgcgacatggtccttacagcaggaagaatttaaaagaagataactttgggggaatgcttgttgtttttctgaccatttttggatgcttgatccgttaggtgaggaagaggagagcttagagttgaagtagatgatgggagtttcgacattttcttctaattaaaactgtaatcttttataacagaagcaaccattctggtttttcaagcatttccaaaaaccattttctcaagaaagagtgctcataatgtatcatcttcactgaacagccacccacttcctcaaatgcaaggaagcagacagttaaaaaagaaacacacacacacacacacaaaaccaagaggcagcagttgtttatcacgacctcaactcagtaaggcctgagattctttcgaaaaggagctttgcttcccatgacgcagagggaagtgtcaactgggatatttctggtaaaactgaaagcaagaaaagcagggtgctagcccctgtgggactgagggtggaggctgggggagtttgggtgccatcctccagtgacagatggatggacctttcatctaagagaaaggaggagacacgttggcaaatcagcctcaagcctaagattgcttgtgaagcaatcataaggaggaacaaaaacagacacaaaaacagagggaaagagtgaaaagacaagaagggcgcaaactgtgacagactcaccgcttcactaactactcacttaaactggaagcaaaatgtccctaaaattgccaaggaactgggatttcaacctgaaagtggaggctgcgaaaataggtatggttggtgtcttttcgttgcctctgtgattcttacgtatactcgagcaccatttgcatgttggtctgcagggagcatagtctacttaaaaatggatctcgcagcaaatctgagtttgagggaccatttgcatttaagttggcatgccaggtccaagttctaaaatgctgggagggggttctctttcatttggacaaaacagtgggatggcactccttggtgtgcaggatctggggtacttcggatgatttaaggctacagactacacacaaaactgtgagtttttagcatattccatttccttcctgtttggaaactcatccatattttgaatggttctgaacaggagcacaaagactagagtcttttgaagtgctcaatctgtaagtaaattcaatgggtgttctgttttgtgagcccaggagtcaaggtgtattaaaaggtagtagcaaaaggtagacaacaaaaacaagacaggaacataaaaacgtactaaagtataataaagaccttacttaataaaaatataattaaaggaacagaatgggagggaattcttagatgagttggaaaagagatgtattttttattattttaagggagactggcatattttctgagatagtctggcctttaatccataccctgtccttctaatgatgatagtgatacattaagtttaatctatatattcgttatgaagttctttacatagatttcttctattgctaaattggtcacagtaattcacatcagagcaatcgggctgaaaactattgcctacatttatgtatctcacccatacatgagataacttccttgatattagatatagataagtattaaggtgtttctaacagcttggaggaattttgcttggaaaaaggtttagatttgaacctctaatggggttaagtgtgctactaaaataagtgctccattgaaaagtcacaagcggagcattaatgatgtaggtctgagaaagggtttgaaagaaaacagagtaatcagagaagccatttatcttgataactaggggagattagcgttccctaatcaagctgtgaatgattgtatgctgaggtcagttcagagaaaaggtaatgttcatacctcttacaaaagcaagagattttcctcctaactatcattgatacaaatgtacttggctaatgctcaatctatgtcatacaaattatatggttctgttcctttgaaagtgtcctgcttctacataaataaggtcattctgccttctctccacctatgtttgaacacaggttattagggtcttactctcctttggtttaaaaaacaagaaagttgagacaattaatagttaaatgatttttttcacagatataggaaattaccacactagagctcaagactgcatatactcaggtctgggatttgattgagtgaatttcatgatttttaccaatgtttcttaaagcatggtcccatagataacctatatcagactcacatcaagtgctggctaaaaatgcagatttctgggcaccatccttacaaaatcagaatctctggaggaaggcccaggatcctgcattttgacaagcaccccccactttcatcctcacctgaggaagaattcctgctgtaggtactgtggtctatgttcactagccccagcagacagttttcacccatttagtatagggcacagtgcttgttcttaactgggcacacaataaatatttgttggctgaatgaatgcttcagccaacaaaaacaagcagatgatgttatttagtattacttaatgaaaaaataataataaggacataatgaaatacagaggagcccttgtcattatccatgctatctataagtttgtcaccctgaaggactggactacagtaggatgcatttataagtgtcacatgaactagaattcagatcataatctgagtcctctgatgggggagagcccttgactcagtcacaggacttccagtcccctctccagcatcctgtgtccaggtgtaactgtaggaactggcttaccaatatatcaaagaaacttacctctattgggaagacctgtggaactgggagttatgtcaggaaagctgacaatctgtggttttaacgttttctcaacctagataccattgacatttggggttggatagttttttgttgtggggcctgtcctgtgaattataggatgtttagcagaatccttggcctctaccttctaggtgatggtaacacccccctaccactaccagttgtgacaaataaaactgtctttacatatagccaagtgttccttggggatgggggtgagggtaatatcttctctaattgagaactcctggagtagatgatcaccaaaagggtggaatataaggtcatttgggactagaacccaaatattaactcatgattcactctgtagctcaattttttggaggcttttattgagatctgtcctcagggagccaggccatagcttaggaaggacactagaatgggcccttggtgaaatagcaagacactgacccagaatgtgacccaggaaaggggccctagctttttttgatgagctatgcttccagtttccccagaatcttgtgagctggagtgaaagtgaaagtctctgagagcgaggggagggactctccactgtacttccatctcagagctgaagagggtcttgctggatggcagactcacctgagtccactaccatgagtctgacagattttcatgcagtgatgaagaaaagtcacagaacttcctgaatctgacctattgatcctggcaggaataggggttggaagaaaaaggaaaatgcagaacaaacagtcttgacttgaggtggagccaagagcacacacttcttcctgtgatcctttatcattttcaattttagaatcatgacagcctttcactgccttcacgcagttactcaaatattttgcctttttaactgaattgtcatcactggaggacaggtccagactttctggacctccagccccaggttacagggctttcttgaaagagttacatggcttcccaatgaccaggccagtctacttgagcacattttgtaccttatttgaacactgaaatgctggttccccagtttcaggagaatcctgaaactatatagcccatggtgaactgatttgtgtttgtttgatgttcagctttctgaacatcagaaagtggtgagtgctttctttacaattcattaccaaacttactatatgctaaccagaccagcctgggttatggactgaatgtggtctgtttgctgtgcccaaagtatttgctttccatgagtagcctccggtccctgatagataaaggtccccgatagataaaggtccccacacatgcaagtagagtcactgctaaaaatacaaaaaattagctgggcatggtggcgggcacctgtaatcccagctacttgggaggctgaggcaggataattgcttgaatccgggaggcggaggttgtagtgagccacgatcatgccactgcactccagcttgggcgacagagcaagactctgtctcaagaaaaaaaaaaaaaaaagaatatgaacatggccttctgtagacagtgaacagctacacaagggagctgttccttccagggcccactctatttttatgcagaggttacattgccattggttatttaagtaaaaatgtctgtccgtaatgttgctgttgacttaacatttaggcataaattaaattctctccacgaagtgcatgcttcctgttgcccaggccaacagccttctggccatttgaggaaaaaggactgatgtcacctctgggccttctgcagcagcagcagagtggggaccaacctaagtggtgatgggaaaacaggacctggttttatatccactcatgcacaaaattccccctgtacatgccagatgaggtcagcttagattctgtactttgtctgagactgtgcacttggattggcagaggctagcttgatggttcttattgcctatgtgtctgaaactaggccagggttaagatgcccaatggccctggcgtgggtatacatcactataagtcacttcattaatggtagtgctgccatctccctgtctctcacctcacagttatgaagcatcttcatgtagcatccaatgggagaactctgtggagactccaccagctggaatgtgatccttttgagtaaggcccactatgggggtgttggaaagatgctgggaccaattgagagaagtaagttgatgaaaatggtcctatcacacacaaggcagcttgaggaaagaatctggcatgaaggtgcaccccagtcgagtggtctgaacttgtgttaagatacaagacatgggagggagtgaagagcagaagcaaagtcccactggtggccacagcaattgagaccaaatagtaccggaagagcatgacggagagccacagcgaggcacaggcagattgtggggattctgtcacagaggatggcatggaaattttgtagagtccccagacaggaactgagatacaaaagttacaaagagagaaaataattgacattttttgtgttatgctttactcatcatcctttttctctttgaaagcttgtttaaaaaccaaaagtcactttgcaaagaaaaaaaaaatgatacccataggtctggcagacctagaatataactttgtcttctttgagggactgcagtgcttcctcatttctagtaagacaggagtgcaacttactgtgttctctttgtcttggctgccaggaagctgagctaaatatgaaatatgaagacagtcctgtagggcatacagttcagtgggggcagagacaaggaaacaactgcaaagcggtgagacaggtgctgtgatgatgagaacagctatgggagtcccagatggtgcctaagaggaattctggccccaccacccctgttcccatcactgccattcaccttctttaagatctaggtgcagatgttcttgagggggccccagactcgctgtctttctcacagtgattttcctgcacattgtatctacttttttggagaaacagaaggctttatactatgtatagaccctctgcatgaaggaattaaatggaaagtctttatgatctggcccttcttacctgcccacctctctcttgccaccttcccttctcctgctgcacactggagacttcagccacatcctcccttctgtagcttccagctctttctcatctgcctggagccctctctccatctgggtctcccttaccaccaccagttcctacccatgctttggtcacaatgtaaacatcttgtccacggggagtctctaggtcttctgatcactggagagagagtataaaaatcctttcccaggccatttaaacagagaagtttacagctctcaatactatggacttccttttagataagagccatgaacatttctgaacatgcatatatgagtcaaccccacaagtaactgatcctttggcttttgaacaaaatgagttgttcttaatacggtatgtaacaccagcactctaggccctcactggggagaataacctcagattgcccaaagaaaggggctaaattgtccattgactcttcttgataaaaattgtgaaagaaaggaggacgtgtgatataggaaagtgtgcatgagcttgggactctgctttaagcagtagtgaatctggggcaagttgcttagcttctacaaatgagagagtaacacatatgctgagaggaagaaaatatttcatgcgtatgacatatattaggtgctcagcaaacatctctttcctttctttataggcagtctcatttccaacctcagatcagactagaagctgtacttggattacattatcttgctaccctcgcagaatagggctcactgagttgtcttttaatgttatatcttcagtttatagcttccctgcaagtaatgatttcatgaaatctgctcctaattgtactggaaaaatgagaatgaagaatggagaacgccagcaacttctatgtataactctatgtgagaaagttgcttgggaattcagtgctcagaaaataactttgtcttctttgagggactgcagtgcttcctcctttctagtaagacaggagtgcaacttactgtgttctcctctttgtcttggctgccaggaagcagagctaaatttgaagctgagtcacaacttctaacgcccatttgattagcatacttttagtctttgtctttgatcagagtttatgtgttcattgcaaataatttccatactttaaaaaatgttattatttaaaaatatagatgggggagtctcactatgttgcccaggctggtctcgaactcctgggcccaagcagtcctcctgcctcagtctcccaaagtgctgggattatatgcatgagccaccacactcagcttcagatttcctactttttagtagtgactgagcattgcaatttatctaagaaaggttcaaggaatattaaaatgttgaaagttatttcttttagttcataaagtaaaacgcaattccatgaccactcatattctttacctagagttacataaaattatgcaatcttcagtacattcagaccagtcatttcatttcatgcactcattgagtcactcatcataaaacatgtatttgctcacttgtatgtgagaggtacttaagcagcattgccctgctgtgcctctcatgctgcaagcacccctcaccacccctccacctttctaaaagtgatgctcaactttgctactaccatctattctccttaagctgtgactgactaaggtgacagctgccgcactgtctcctttccacgccgtactatccatccacccccaaaatatgcacacatggatctcagctctggatggggctgcgataccccactgctggaattttggcctatggtggctgaaccatttgcttccttgttggtttggagtttcaaagtgaaagaggaagcagtaagatatagagttcctgagtgtgatgtgaatactttttaatattttaaaataattttataaagttgacaaaaagaattttctgacaaagtgtaaactaaccataatggaatgagccagctatcatacagtggttaaaaagctggctttggggccagaatgcctgaatttgaatcccagtatcatcgatcggtcactgtgtgacgttggacctcaggttttccaactgtaaaatgagtgcaatcctagtgctaactcatgcagttattgtgagggtaagagaagatgatctatgtcaaactttagcataagagctggtgtctagtaagtgcttcataaacactagtaattatcattattgttatggacattagctataatggagatctgatatcagctcctttgaatcaagtcattggtgaaaaccacagccagcagtgccaaggttttgtttgtcttgattaggtttagttcttcattcttttctttagacatatggtctttacaacatctgcagatatctcctttcctgcccagtgtctgctcctggctcacagcacacatgctgatctgcagttgactggttatgttctgcttcttactctttatgcttccaaatgccatgtactcacttccttctcaatttgcatgaattgtgtcaattttgtctgcatggctattcttgttttcttcctttttgctttgttttgtttgtctatttttgccagttattttccaaataagtaaaatgcctgagttgtgactttctaataaggataatgatagcttctggtaagtttcctgcagaattcctgctgtagaaatgtcattgtctctgtgctatgacaggagcagttcctcaaactttccttgctttgggtaggcaaagagtgactctgggttgtttgctgtgtggaagaccctcctccatgacttagtgcttcctcctccagagctgcccaccatctcctactgtcatgcgtacctctggccactgaagtgaggttggaagttgttagtgtgggcttcaggggctcagtgtttaactgcttgtgatcacttacatgtgggttacagcaatggcagagcagtttttcctattagctctaagagtcctgtacctggcctaccattctctttcagatcattatttgtagatataattgtgggggaagagcaggaccttcaaaatgaggctcccgcctttcttgtcctcaattctgctgttgctacccaaagattcttgtgcatgcattcttcctctttgactgtcattctgcatttgattccatgcacctggtcattcagaagccagaaatccactttattagtgagtgaggaatctccttatgcagacatctcagagtaaaaatgatagcagatgtagagttgtcacctccagtccattctcagcccagcccttgtgctctgtcctgagaccaatctgtttgatcttgattttggcactgatcttcttcctgtgagcgttcctcattctctttcccaggtagagtgacagctggcctgatttgtctgggactcagggggctcgtgggacatggaactcagtgtgaaaaccaggaaagtaaccctagaatcaggtcgctaggcccagggaaacaaagctgtaattgtgttaggtgctttgtatgtttcttgaattgaatttcctgagaagccacacaatttatggcaaaaattgatttaggagaaaatatctttaaacctggagtcattattctttctttttagtactcatggttagaaatccttccaaattcatttttcagcctccttgaaactgtcatgctagcttcctccatctgtttttatgaaatcttttagtcttgctcacattttctccagaaagatcgggagccacatctgtcagtgtattgcaaggtacttctttctaaaatcacacaaaaattcctacccttgtgggtcctatatctggcccgtaagtttgctattctgctttctggatatatatatattttttccaactctatctctccctccccattaccagggccaccacccagcttgtcctgggaaggcttcctgaattacccaggtacaattagtccctctcccttctgcgagattgtaccgttttgctcatttttcttctattctgattgacacatatttattggacacctactatgtgctggacactttactaggctcagaattaagaagatgaaaaagattaagattctgacagtctcattagagacactctgaggaagcagggctctcccactaaagggaattagacatatgcagtgtgactgtgactgtgacatttaaaaagctgacacagggtttgttctgtaacaaaagcttttcttgccccacttgagccatagcccctagatatctacaaggggcaagtttttacatgttcattcaagtctatatgctccttccaaaaagccacaaatcaagcttctaatgccacattgttattctgatttagagccagtagagagtgcccgcggacaatgcagttgcatttccaccaataaatgtggtctattttcattatttctccccagaaaaccctggatttaaccagttttctggccagcacaaaattatcccaatctcattcttctgtggcctgaaatgcccagcatggtaatgaaagtgattgataatgtagtcaactttgtgtcttcacagataaaaaataagattccagataaaaatcacttcctgaaagaaaaacaaaaaaggacacttgacttaactacgaagacatacctgaatgtagtaggcagtctttgagaatgaggcccctaaaggcagatgagcctgggtttgatttccagctcaaccttttctcacttctttgactttgggcaagtcactttaatgtctctgtgtctcagttttctcatctgaaaaatggggccggtagttccacctcctttgcagagctgttaggtaatacttcctccaaccagctcagccactcatagtcataaataaaccatgtcacctcctacaattgtaccacctctgaaatctcactttcagacttcccactctgtgcccaccacatcctatgtgcccagctcacccactccagcaattctctgacattacctcagtgagccaccattccattggtcccaccattttttcactatcagtcaccccattaggtcctccttaccatagattcataactagcattaaatctactactgaatatgcacccttaaattctctggccatttttcctcatcataacccctaaccctatttaaacctaataatccaccttcttagtgcctgtaactggacagctgaacatcgctggagaagatcacccctgagctgcctggattcactttgagtttgtgaccagtcatttgaggtgggcactcaacagagccagacaaacttactacgtctactgtcttaagagtccactagtgctgctgtaactaaatagctgagactggataatttatacagaacagacatttatttattacagttctggaggctggcaagtccaagatcaaggtgctttcaagatccatgtctggtgaaggctcattctttgtagatgatgctgacttggtggtctcacacggcagaaagggatgggagggcaaaagggaggagtgccgtgacctcacattatggaagagcagaagagggtgaacccactccttcaagcccttttacgaggatcttaataccatccatcagagcagagctgtcatgacctaatcacctcccaagggccatacctcttaatactgttgcattggagatgaagtttcaacatgaattttggagggggcaccatcatttaaactatagcacatagctagtaaattcactttcattttccccaaagcttttatgcctactttttaattttctcctcaaggtcttaacacttccttctgccgtcactctcactgataacattcatagagaaaaatatgtacaactaagtgagaattactcaattttcctaccaccaaaagttttcgtctacccacatctttatctccattgctgcccataggcctggacaacaggggcctccattggaaacatgtattttagagggtcctgctcttttcttgctccatctgtactccttcctcctcacagggcaaggagtctggtcaagcggacatgcccacctagaccctgtgccctgcctgccttctagaccatctgagattgtgaaattccctacgcagatggccaggagctgcaagaatgttttctaggtcctcccagtggtttttctgcagacggttgattgcagagaggcccagaacaaagttcggatgtctgggctggggtgtccacattcatgtgtgtaaggcccctgactgtgaaaaatggaaatggagatggagggagaaggggcatgggcatgggtttaaagacagggaccacccccctccccatccccacagggccgggcgcggtggctcacgcttgtaatcccagtactttgggaggccgaggcaggaggatcacctgaggttgggcgttcgagaccagactgaccaacatggagaaaccccatctctactaaaaatacaaaaaattagctgggtgtagtgacgcacgcctgtaatcccacctactcgggaggctgaggcaggagaatcgcttgaacccgggaggcagaggttgtggtgagccgagattgggccactgtactccagcccaggcaacaagagcgaaactccatctcaaaaaaaaaaaaaaaaaaaagacaggtgtccccatgtatcttcttgacacaggctttcaaatataagtgatagactgattccttctcactcatcagtcagcccaattaagcatctgtcctcgtcttactcaactgtcctgcagcatttgacacaatcaggcattttctccttgaaaaaaaattttttagacttccttgacactgtgccccctggctttcccttacctcattagttactcttcctgagtctgctttcatgaagtctccttctctaccagatctcttaacaatgaagtgtcccaagcaggactggccacatcattcgtggagcctagtacaaaatgaaaatgtggggtcccttgatcaaaaattattaagaatttcaacatagtgacagcaaagcattacaccaagtgcagggaccatctaagcatggagtgctgtatgagtgtacaggttttctgtgaagctggctccggtcccagggctcagtcccccgtcctcttccgtttatccaaccttaaaacctttaaagccctttccatggctttaagtcctaccttaactttcatacattagctccaacgtctcttctgggttctggatggccccacatctccacctgaatatctcacgggcttccctcccccagtgtgtccaacacagaattctgaatcatccctcttcccacccctccacacccagttcacctgccctttgcaaaaggctctactattcaccgagttgctcaggctaaaaacctagagtcatcttcattcatgttttccccttccactccagatctaatccaccagaaaagacttttggattcaccaccaatttatgtccttaatctgactatttccgttatctccaatgctgtaaacactgccatttcttgcctagtctaggaaatagttagctgacttggcttcctgcctccactcttgtcctggaccatgtattttctgcacagtggccagactcgacatcttttaaaagtggaaatcaaatgtgtcagttcctcattaaaattttcagtatacttaggattaaattcaaactcatgatctatgcccgtgggatcaggccccttcccctctgtctccacccacctgtagtcctctgctcctcccacactgtgtcccagccacaccctccttctattaacagttttctgaacatccagtgctcatagccaccatctcaaggcctgtctgctgttctccctgaaatgtgcttcccagatcttaccatggcctttcctccactccatccagttttagttcaaatattatctcttcaaagaggtctttcctgaccctagcatataattagctgtaattagcccctgcaaatccaatctctctttatcccattatcttacattttttctttatactgttatttgtgcctgaaacgatctcattcctttgcatgtttgcactagatcataagcttctgaaggcagggctttgcctgtttcatgcacttttagatagtcactgccaagaacagtttctgtcacattacaggtatcaaagagatttttgtggaatagcctgtggcctgttaacttttctgcagcccagtgaaattaagtaagttaaaatgagtccaaagcatttttttttcctgtccttattagtgattgaacaacagtttggtccagagagagatatttctgactttcttatggagagggaagtggggcttttggtttctgaagctaatttggaacagcatgtgggtgactgagcatttagctatccctgagggcggtcaggtcttaagtcattaaggcttagactactgaacagagctacaaggggtatgtcttgctcctataatcaaagtcttcttgatgattgaaactcaagtgtgggcagagaaatccttcagactcaggggccctgggaaaagtagctctgctcaggaatccaaacatgagaattaaacctcagttttgtagtatgggcagttaggtttagtgggtaactgtgattagaggcgaggatgggcaagggagaggaagaaagaaagacagagaagcttagagagagagggagagagataccagcatacaggggtgagggagaggcagatggaaggaagaaggaggaagaacaagtggaggatggatgtgggtggaagagaggaccaattacattgggccctatgcttagaagggttccacactgaatttgttattttgttgtgaccatcctaaaattcttaatgatttttgaacaaggggctctacattttcattttgcactgggctctgcaaattatgtaactgactgacattctgccaccttgtatcacaggaactaggtcatctttgagccatcccttggcctcatgacctcctccttccccaactgactgcaccgtcagtcctgtccacctcctacctagatctcacattcatccacttctcttacctccctttcaagcctagattccactgtaagcctcttaaccatttcccgtcttgcagttttcatggcctttaatttattctctgtgagcaccccagtgcttgcgagtgtcgatagctttgtcgatcagagcagtcaccctgaggctaaagggaatcatgcaaaggcagcctcagtgcttgagctgaacattctcaactcctgcactaagttagtggttaccaaacgtggctgtcctggggaggtttaaaaaaattcacctgctcaggttccactccagagacatggatttaagtaacaagggctgtggtctaggtattcgaacttttctaagctcccaagtgactggatatgcagcaaagtttgtgatctgtgccataagtgttgctaagacccagagccacagcacaatggcaacacattcccaaaatgtttgcaattttgttactttatcatagtggttttgagttttgcaaaattttcttctctaaaaatatacattaaaacattatttaatattccagagtacagctttgagtaacctggcccttttttaaattttattttttaaagagacagggtcttgctctgtcgcccagtctggagtacagctgtgtgatcacagctcactgcagcctcaacatcctgggctcaaacaatcctcccaccccagcctcccaagtagctgggaccacaggcgtgcaccgccatgcccggctgatttttttttttttctttttgtagagatgaggtcttgctctattgcccagctggtcttggactcctggccccaagtgattctcccaccttggcctccccaagtggtgggatgacagacatgagccactgcgcccagccccatgaagccactttttttttttttttttgagatagagttttattcttgtcacccaggctggagtgcaatgacatgatcttggctcactgcaacctctgcctccctagttcaagcgattctcctgcttcagcctcccaagtagctgggactacaggcacctgtcaccatgctcggcgtatttgtatttttagtagagactgggttttgctatgtcggccaggctgctctcaaactcctgacctcaggtgatcctcccgcctcggcctcccaaagtgctgggattgcaggcacgagccaccgcaccgggccgagcactttttaatttttggaaaatgtgtacctccactgtgagaggcgtctgtgtgtgtgtgttgtggtttgagtgccctgaattagttaaaggcattccttcttctctgaggttccctgcagaccggactgtctgtgattctgcagatgtcagggctgcacagaagagggtggaggccgggccggccccagatcctgctcacacagggaattagtgtcagaagtgacgtgttaaggggttactgaaaccaaaggtgaaagctttttgcttataatgtgagtagtgaggaggaggcactaataatagttattaatgccacttgtcaacagacccctggaaaataggacaatacatcctttctctcccagcaagtccagctgacatttatttcacccgctttaagcacgaattacctgtggagtatcctagaaggacttgtttttggaataacattgcagactccaaaaattgtctaccatttctgactctttcaatgtctttcacttgtacacagtgtctcattccatcctaagaggggttaaaggatgctcatcctcacgctgagcccagggagggtgcaggacttgctcactcacccagccaatggggggtgctggcctaatcccaggcagtattctgactcccaacccaaacctattgttggtccactagagactttggatagaaaccagaggagaataggaagggccaggaaaaactcaggcatgtaaaacaaggaaccaattttaagggtggaaagctaaggtggagatacatagcatgtataaatacaactaaagagccacgggcatttggcacattttagaggacagttaagactcttactatcctccagttagcagtagatttcctcctattcgcacacctgccattgccattttccctttctgttccaaacgacttcagaatggcttacaattacacccagctaacatctgtatcaggtttatattcagtgtctttccctttgtgtccatggattagcttcagtaagcccaaaaccctctagaaattgtgtgaaaaattatatgcatataggcagattctcaaaggggcctgtaatctcacaaaggttaaaaccattgctttatgtttccaagtacagaaaatctcctcattaagtaatcctgtaataattagtcttcctggtctggaccaatccaagagcgacagctaaccgggaaaatcctagaatggcctgctgaaggctggtcctggccagccacaggcctgcttcctgttcattgcgaggtgtaaactgacgctgggagtggccactagatggcggcaaactcagccaagtttggcatgggcttccgttggcgctaccaactggcaagctgtgcaggttcctggcatccatttcattagcttcaaaataacgcgaccacgaatagttgattgaattttagaccccacgtaaaattcttctggacctcacttattgtgttggggcagggatttactgttctttcaattcacttggtctttaaagcatagagggcaggcagcaaaattaccctccacgtcctgacatctctaagggaataaagcttgggactgctataaataaggaaaacttgttaaagttcatgaaatcagctatggaaattgtggaacataagtcatggttccatttgttttatagaagtgtaaaaaatgaaatctgttcttcaagatagaaaaaaaagagaaatattatgaatgccatttaaaggagacacctgccatttctgtttccaagttcccctggggcccacaaccttttatttgatagtaggtctccagaagagcagtggcattattgttatctcatagataaatgtaataggcctccttagggctgttttcccaactccacctttctaagggctcctgacccagtctccaaggatggtcactggcttgaactttggcttgaacattcccccttggacatagccaactagagcagaatgaacagctgactcaagctgtgtctatttcatttctcctcagtctgaggttcacagagaatgggcatttgtaagtgagtcctggaaatcagagggcactaagaggaaggcctttgaactctgttgagaactcaaaacctgcaaaatgtgcttgatttctactcttcctgagccatgatttccaaccccccaaatttccctagattttgtgaaataatatactatgctttaaaaattacacacacataaatattatatacatagtatatatacaaagagagagagagagaaagagagagagatatcagggattcccaatctcatcactattttgatccagataattctttattgttgggggccatcctatgcattgtagggtagtccctggactttacccagttgatgacagcatcaatcctcccagttatgacaaccaaaaatacctctagacatagcaaaatgtccacttggggtggatggggggggtgataaaaccaccccccagttgagaactattagctatctatccttctatttatctgtatctagattaaaccaacttgatttggtacctgtttcttgcaaccaagatattaactgagacaatgggaaaataaagacgtagagaaattatctgaaatgctcatatagtaacacagcaagttgctgtatggcggaatcaagactagatcccagagctcctgaacattagtgggttttctgctactttccacaagagaactcctgtgcagggtctttaaccacaccaacttgcccagcatcttgctttcctttgtattaaaacccagtactacttgaattatggaaggaaacactcctggctacattttcttatttgtttgggtcatcaaaataaataatgtgggtggggatcatggtagggctttcttcacaggaagttgaagcagtgtgggtttgttgccaggcgtggcatcgcatggctttccttagcacctgtgaaaagaacaaagctaaatgatggggtgctatctgtccactctgaaatgttactcccggatcactggggtagatttagcttgatgttgctcttgaatgtagtctttcccacgttctcatgttttttcaggttacttacctcaacaagtcgctgtagaatagtaaatatcacttaatttttttcattcagaacttcagaacttgcattatctgtggaaacatttgaaggtcaggaggaggtgagaatgtcagctctgtgtaacaaatgtgcaataaatgtgagcaaatgaaaacaatgtttttaaatggtcattcggtaagatgtattttttttttttttttgagatggagtctcgctctgtcacccaggctggagagcagtggcccaatctcggctcactgtaagctctgcctcccaggttcacgccattctcctgcctcagcctcccaagcagctgggactacaggcgcccgccaccatgcccagctaatttttttgtatttttagtagagacggggtttcaccatgttagcctggatggtctcgatctcctgaccattttgaactgcaatcaggtgggttttgttaaatacatacagccacgtaacaaccaccacaatcaagagttccatcactgtaaaaaaattttctcctctcatctatttctagtcagcccctctcacccagcccaaaccttggacaaccactcatttgttatctgttcctatgcttttgcttttttcaaaatgtcatataaatgaaatgataatgtgtgttttttgaagcctggttgcttttattcagcacaatgcatttgagattcacccatgttatgacttgtatagatagttttgtcctttttattgttgagtggtattctattgtatgaatgtatctattcatcacttgaaagatattgggattgtctctaacttttagacattacgaataaactgttgtaaatatttgcttataagtttgtgtgagcataacgttttatctcttttgggtaaatattgaggagtgctactgctggatcatatgataggtatatatttaactttataagaagctaccaaattgtttcccagaggggctgtatcattttatgttcctactggccatgtatagaaattctggctgtttctaattctcactgatccttgatattgttagttttttaaaaatttatgttagttattctaatatatttgtagtagtatctcatcttgattttaatttacattttcctaatgactaaggctgtttggcctcatttcatttggtaaagtctcagatcaaaattttgctcattaaaaaattttcttgttttcttattgttgagttttgtcctttttcagatatgtgatctgcaaatattttctcctaacatgtggcttgcttttcactctcttagtgtttgcttttcattctcttagttttaattttgatgaagtcaaatatcatgtttttcttttatggattgtgcttttggtgtcaagagttgtttttgataacctcaatccagtatattctgtaaatattgaatacatttcataaatattacagactctttgagtcttttgttcaactcctgcttgcaatggtttgcaaacattttcttttattttttctctccagcactgcccacatgaacacacccacacacttaagcattataaacacagatttcctgtgttactctgaactctcaaccctccttttccaggcctcctcccaaagatcataaaagccacattttccaaaatatcttttatcactcagagaaaagtgctggaagattgtaatgaccagtgctatttttatggcagaacactccaaaataaaaaaatatatatcatactggattctctttttcaaaattatacaagttaattcaaaatggcattctgaaaactcaccgcccgccaatccatcaatcccaggtatagcataatacatgctatgtattaactgaatttaatgttaaagtcaattaattagctacatttatctatttgcattttgaaacctcttcccatatattaaaaggaacagaaatttttgcatgcttttttcttgagtctgagtacaacttctacctaccgctcttgcgtctgattttaagttggcttgtttcacagttgatacaataagaaaatgctaagaaagaggagtgggggtaatggttgagttaaaaagttgaaagaggaaaaatttgatttgttcttgagcacacggagcaaatccctttcttttgtttctacaattttacgttaagatatttactatttcttttctaaatgtatcctaaacaagcttattataaaacatgttattttatgtttgatgaatctctatttggtatatgcattaaatttaatgaaattatacccttaaaatatagctcatagaggattatgtgtacatggcagaatctatcccgccacctagacaacaattactctttccaagtctgtctgatgtatctattttgggaccctggtgtctaatcaaaattggcaacttccagaaggaggcttggacagtgagttgtacttaatttcagtgagtttcagctcttaacacaatagtggctgcacatcctctacccctagccctgtggcaggctttccagatgtgcatacattccagtagcagcttgtgctcaacgtgcaggggccgaatgggaaaaaatgaaccctgtcctacaaataacagggatctatgttgtgatcactgatgcctgcctctgaacacaaaggtacagacaaagaaatggcaaccatgtgtttgcaactctccctattgttgtaagcacctccccctctggctgaagtgacttccaggggatttaaagagcttgtgccttttcctgtgtctccttcatttttctccttttccctttttgggagccagacattgaagactaagacattcaaaagcaaccacatatatggggtaagttggaaagacattgaacttgcccaggggaaggtgcagcctcagaaaagacctaagaagactcttaagtgtgcagttcaggctgatccttggcaacctacaacaattacaataaacaaacaaaatccagcaaatccttgaggaagggagacaatctgatttccagagttaccatatcattagattcagatatccagttgttagcaaaaaattatgaggcataaaaagaaacaaaaacgtatggcccactcaaaggggaaaacaaagaccaacagaaacagtgcctgatgaagacctgatggcacatctactagacaaagacttttaaaaaaatcttaaagatgcttaaaaaactgaaggaaaatttggagaaagtcaagaaaatggtgtatgcattaaatgaaaatatcaaaaaagagatagaaaacataagaaagaaactaaaaagaaatgcgggagctgaaaagtacaataactgaaatgaaaattttaaaagagggattcaaaggcagatttgagcaggcagaagaaagaatcaacaaacttgtagataagacagtgaaaattatcaagtatgagaaatacaaagaaaaaaatataagaaaagtgatcagagcctaagagacatctgggttaccattaagtggaccagcttactcattgtgggagtcctaaaaggaaaagagagaagggtgcagagagaatatttgaagaaataatgatggaaaacttcccaaatttgatgaaagacatgaatataaacatccaagaagttcaatgacagctgatgaactgaaagagacccacatcgagatacactataatcaaactatccaaagtcaaagagaattttgaaaacagtgagggaaaactgatttgtctcatacaaggaattttcaataagattatgggcaaatttatcgtcagaaactttgaaggccagaagtagtggtctgatatatttaaagtgctatttttttcagctgtcaactagaaattttatacgcagaaaaaatattctccaaaagcaagggagaaattaagacattctcagataaacagaagctgaaggagttttttacttgtctttgcagtaaatgctaaagggagtccttcctgcaggttgatataaaaggacactaaacaataacttgatgccatatgaagaaaaaaagatctcagcaaaggtaaatacatctatgattttaaaagtcagaattgctataatgatggtatgtaactccacctttgttttctgcatgatttaaggggcaatcattttaaaaacaattattagtctggaagctagcattattgtcagtctggtttgtaatttcacattttgttttctacacaattgtggagacatgaaaaattattagtatataaagatgtaattctgagacatctgcaacttaaaggggtggggtgcagagctgttaaaggagcagagtatttgtatgttattaaagttaagttcatataaatttaaattagaatatcatcactttaggatagtaagtgtaatcccaattgtaaccaaaagaaagtagctaaataatatagacgtacacaaacacgaaggaagaaagttaaatctttcactacaaaaaaatcaactaacacaaaagaagatagtaatgcagggaatggaggacaaaaaagctgtaaggtatgtagaaaataaatagcaaattacagaagtaagttgctgcttgccagtaattacattaaatgtaaattagactaagctcaccattaaaaagacaaagattggcagaatggataagaaaacagcccacctatacgctgtctacaagagactcactttagacccaaagatacaaatagattgaaagtgaagatagagaaggatatttcatgtaaatagtaaccaaaagagaatgagtgactatactaatatcaaagaaaatgaactttaaatttaaaaaatgctacaagaaacaaagaaaaacattatacattaatagattgctcagtacaatgagaagatataacaataataaacatttacacatcaaataacagaccataaaaatatataaagcaagcattgataaaattgaagggagaaataggcagttctataataatgttggagacttcaatactccactccaataatgaatagaacaaccagacagaagataagtgaagaaatagaggacttgaacaacacaataaaccaactagatctaagagacatatacagaacactctatccaacaacaaaatacacattcttgtcaagtgcacatggatattttctaggatagaccatatattaggacacaatttaagtctcaatcgattttaaaaggtaggtatcgtacaaagtatcttctccagccacaatgggataaaattagaaattaataaaagaaggaatagtagaaaattctgaaaattgtggaaattaaacaatacactattaaacaaacaatagatcaaggaagaagtcacaaagatggttagaaaatacttagaggtgaatgaaaacaaaaacactacatgtcaaaactatggaaaacagagaaagcaggagtaagagggaaattgatggaagaaagatcccaaatcaacaactgaactttataatttaagaaactagaaaaagaaaggataaactgaacccagagctagcagaaggaaggaaataataaagatcagaacagagacaaatgaaatatagaatataaaaataagagagaaagttaacaaaacaaaaacttagctcttcaaaaaggtcgacaaaatttacaagccttttggtagatggataatgaaaaaaaaaagaagattcaaattactaaattcagaaatgaaagtgagggtattaccacctattctacagaaataaaaagaaatataaaagtactataagcaattgtacaccaacaaatttgataacctagattcaatggaaaaattcttagaaacacaaaacctatcaagcctaaactaaaagaatagttttagtttagaaaagaataaaatctgaatatgcctctaaccaaggcaattcagtcaataatcaaaaatctcctaatgaattaaagacctgatgtcctcaccagtgtgttctaccaaacgtctaaagaagaactaataccagtcgctttgaaacttctcaaaagaattgaaaaacaagggaaacttcctaactcattctacattaccttgatattaaagccagacaacaacatatctaaagaagaactaataccagtctctttgaaaattttcaaaagaattgaaaaagaagggaaacttcccaactcattctacattaccttgatattaaagccagacaacattacaagaaaactgcagaccaatatcccttattacattgatgcaaaaatcctcaacaaaatgctacaacagaaaaatgacgcaactgcacaataaaagattataaatccagaccaaatgggatttattcttgaaatgcaagggtgattcaacgtagaagaatcagtcaatttcattaatacatctcattaacagaatgaaggggaaaaacatatgatcatctcaaatgatagtcatgtattcgacaagattcaacattctttcatgataaaaacactcaataaaccaggaatagaaggaatctacctcaatgtaataaaagtcatatgtaaataacccacagtgaacatcatactcaacgttgaaagactccaagcttttactctgagatcaagaacaaggcaaggatgtccacttttgcaacttcgatgcaatgtaatacttgaagccctagacagaggaactaggtgagggagagaaataaaaagcatccacattagaaaagaaaaagtacacttatctctatttagagataatataatcttatatgcagaaaatcctaaggattcgaccaaaaagctgttagaactaataaacccagcaaagtagcaggatacaaagtcaaagctcaaaaatcagttgcacttctatacactaacagtgatcaatctgaaaagaaaattaagagaatagtttcatttacaataccatcaaaaagaataaattaattaggaattaacttaaccaccagaaggtgaaatacttgcactacaaaactacaaaactgcaaaacatttctgaaagaaattaaagaagaacagaataatgggaagacatcccaggctccctaggttggaagacttaatactatccaaaccaacctacagatttaatgcaattcctatcaaaatcccaatgactttttgtagaaatagaaaaactcatcctaaagttcatatggaaactcaagggatcctgaatagcaaaaaaaaaaaaaaaaaatttttgaaaaagaacattgttggataactcacatttcctatttgaatcacataattcaaaaattatatgattagttacaaaatttagagtaaaccaaaacagtgtagtaatggcataaagacagaaacagatgaatggaatagaatagattgtctggaatagaatagatgtagaggtcacatacacatatatgacctcacatatatgtgtatggtcaaatgattttcaacaagggtgccacgataatttaatggggaaaagattgtcttttcaaaaatgatgctaggaaaactggatatccacatgcaaaataataaagttaggcccttacctaataccatatacaaaaattaactcaaaatggacctatgaactaaatttaagaccccaaactgtaaaactcttagaagaagacgtggggcaaaaacttcacaacactgaatttggcaatgatttcttggcttcaacatcaaaggcacaggtaacagaagaaaaaatagtcaaattagacttctgaaaatttaaaaaattacgtatcaaaagatactaccaacagagtaaaaaatcaacagaataggggaaaatatttgcaaatcatatatctaacaagggattaatatccagaatgtataaaaagctcctaaactctacaaaaaaaaaccccacaaacaactcagttcaaaaatgggcaaaggactcaaatagacatttctccaaagaagatatgcaaatggacaataaatgaaatgatgctatcaatattagtaatcattagggaaatgcaacacgaactacagcgagatagcaactcacacccattatgatggctgctattaaaaaactggaagataacaaatgttggtgaggatgtggagatattgaaacccttttgcactgttggtggaaatgttaaatgttacagctactatggaaaacagtatagcagttccacaaaaaattaaaaatagaattactatctgatcccacaattccgcatctaaatatatactcaaagaattgaaaacagagtcttgaagagatatttgtacatcacgttcatagcagcatcatttgtaataactaaaacatggaggcaacccaggtgtccattgacaaatgaactgacaaacaaaatgtggtatatacattcaatagaatgtattcagccttaaaaaggaaggacattctgcaatatgctatagcaccgatgaatcttgaggacattatgctaagtgaaataagctgcttcaaaaaagacaaatgctgtataattccacttatgtgaggtgcttagaggagacaaattcatagagacagaaagtagaatggtggttaccagggctagggaaagaaggaaaaggaagttaactctgtaatgggtacagaatttcagtttttcaagatgaaaagagttctgaaaatggatggtgatggttgtgcaataatgtgaatgtacttaatactactgaactgtacaatcaaaaataagatagtaaattttatgtgtgttttactggaataaaaataattgggaaaaaataaatcacgcaagttataatttgagaaaaatagcccaagtcaaatattacaactcatttttcatcttcaaaagctctcgtatgctattagatgtgctaagccagagggatttggaattaggaccgcatcctggggtcccggtgttagcctgttgagtcaccccctcatggttctccttcttttacctcctgtttgtgcatctctggttcctgcttcttcagcctttgcacaaaagcttagttggtccttcagtgactactggctaaaaacaaacagaaaaagaaaaaagaaacaaaaatggtgttcttctagttcttccatgagaactgtgaaggagtggccagccaaaaagaaatgtcaagcagaggctagtgtgtgggccaagaaagtccaggtcagacagaaacactacagttgctcacagatacatacaaaataagtcctgacatttttgtgaggaccttgggtgataaaagggaaaccccctaacacatttttcaggcagctgataatgtttgacagctttgaagaggaaacagaactaccagatgtcagtggctgaatcacagggaaaatactgcattctgcaaagccttactcaagcatcatgaagtgtagcccaaagttgatagaaatgctgataaataataaaattttatgaaaaagtaaaatctcgatactttttcacaagtcactagctgtaaccaagacaatgatgttggcttttttgtatttgatcatctttcatgaattttagaatgctttctttatcaaactctaaaaaatctttaacaaaattgcaaagtgtcacagcagtgaaaattttcataaacttcacagctctcaattatatgacacagtagaagtatcagaagtattctgctgtgtcattttctgtttctttgaagattctctgctgtacttcatcatttttccatatacagttaaaacaccaagcaaatatttggcctgaatcctaaaaatgtttaattcttccaattttctgtagttgcattttcagcaatacagagcgttccttcaattcttccctccccttttttcggtttgagatacactttaacacctaagaatgtgatcttctgttctttataactaacatttaatataaactaatgttgaatttatcaaaagcaagttcataatctttgaaaacataagactttttaaattattgatgggctaaaccatttactagttttttaaatattgaagtattcttgcattcctggaatattccagacatttgagtgacaaaacagtcaaaaatctctaactctgcagagtttctggcatgtttcaccacataaaaagtgtagaaaattattctcattttttctgcagaaactgttctactcttcactgtttccatggtgggttttttgtgtgtatggcagttatatatattatttagtttctaatctttcttttaaaaactttactgaggtataatttatatgccataaaattccttcattgtaagtatacaattcaatgatttttagtaaatttatagggttgtgtgatgattaccatagtccagttttaggacatttttattaccccaaaaagttctctccagccgttttgcaatcaatccctgctctcaccctcagtcctggcaaccactgtctctacagaattgccttttctggatatttcttatgcacagactcatataatttgttgtcttttgcattcaggttctttcacttagctgaatgtttttgaggttctttgtgtggcatgaatcagtcctttgctccttggtgttgccaagtagtattgcgctgtttggctttcccacattttgtttatccagtaacctgtttgtggcttctggattgttttcagttttgaccatcatctataatactgctagaaacattcacattcaaaaactgttatggacgtgtgccttcacatcccctgaatagattcccaggagtggaattgctgggtgctatggcaagcttatgtgtaactttttaagacgcatccagttaaggggttaagggagggtagctaccctctctgttgaaggaaagttcattttcttcttgtttttcttcttgtgtagctccaggttaggtggacaggcaccctctgttctcactggtatcgtgacctggttgaggagccagcaggacagagctgttactttttgtctggcctgactttgggcacccagggtaaactggaaataacatgccccagccagacctctgtgcgcacttggaaggagctctcaggtctccatctgttccctgcctccatgctgctgctgttcctctctaggtgttgttagtgcaggattttcttgggccctttccgctccctctggggcaggctgttccatatgcattgagttgtgagaccaacagctttcttcagtttagccttgcctatcctacatcttgcagaaatccgtcttccccccaaatggcatgcagatagaatccttctttacttttactttcattttagatctccccttgttattattgagctagtccctttgtcattttaatggaaatttggaaatggaagctcttgccatgaggtcacctagaattctaggtggtcattccttcctgagttccctcacagaccacccttgggctccctccggtttctgctgccctttctctctctctgccagtaagtgttggggtaaaagctgactttacaggaaatactatccatactggcagcctcagtaagtccctcagttcttcccattcatcagctgataaagtgacagtgcagggatatggaggcggatctgtctgggagggaatgtgtacgtaagtggtataacatctgtgtagtgtcattccgctgtgctctgaggagtaacaggtctgaaatgcagaccttggaaaatagacaagttgaagtttagagcaatagttgacatgtaaaaaaaaaaaaacccaacaagcctattgaatttatttttaagcctaataaaatatttaaaaagatcatttattatatcaacattccaaacacaacagagaaaatataatgaacccccatgtagacccactactgaagttcaacagaatatttcgtcacattgttttatctatccctttctttttcttttattcccttttatgctaagatattttaaaacaaatcccagacacattttccccatgcttaagtatgcatccttaaaaatatggaaattttattttctagccacattgtcctgatcacgcctaacaaaactaatcaataattcattggtatcatctatcctttatccatgatcaaattgtctcagtttttaatgaaatctttttatcaggttgtagaataggagaaacatattatgactcgtttcctgggcccaccccactgctagcattattcattggtcactttaactctcagtagtgttaaagtttaaaatcactgttccctaagacctgtagaggccccagaaactgactggagtgacgtctgttaggctgtaatggcttgtagcctcctcaagggccagtgcttgatggtagttgccagtacttgagcattgccctggaagggtccttcctgtgaattactcaggccatataattcatccatgcttatgcaatacaaatatttcaagcatcctaatgcacttatttatttatgaatgctagtgactagtgaaccaaaacctcttacctaaaataaatgactagctttggcaatggaggggtcagtacttcgattgctcttcctaatgtaacacaccactagggtgttgggcagagcttactgcactaattatcctgcagtcctacctgatgagaattgttcttccttacactaacgcctgggaaagcaggtagcttgcatatgcagttaaccagctacattgtcaaagaattttctacagagaaaatttgccctctgattgccaaatctccactttgccttgtgctgaggaagaggcagctctggggcagtgttcttccgcaagcttcttgttattacacgtggcttcctgttatgcagagacaggcggagagggctgggtaaggtgttgcaactgatggagacacacagacccacaagaggcaactgcactctaaattcctaagaaacacgaaagccacaaaacatgaacactggaggggtggccctggagaggcaccctaggtgaaacaaatttgctggcgtgcaaaaaaaccttgcaatatttgttgctggctcaggtttccagagctgctgataagaaagaagtaacagaaagccagtactcctctctctctccccttctctctctctctctctcttgttctcactctctgtcattctctctccctctctcttgttctcactctctgtcattctctctccctctctctttttctctctctcacacacacagataatttctctccctctgtctcatattgctaccaagacagcattttttacctcttcctgcagaacacatagttattggtgccaagcccctttccaaagcagattcttttcctttaggttgacatagtcacttgtcaaacaataaagggcatttctagaatccatagaacatgggaaaatgaaatctgcccaattccggagtattgaggcaggcatttagggaacaacttttagatatttctatgaattcggttatacaaatttgtctcaagggtgagtgccctgggaagacccgtgtggtttaatttcagggtacagagagaaggctcctttgctgtcatcagtctcacagtaaagatgccttttgaaggggcagtgcttttcatactaaagttaaaaacgaaactcaaaagaatgatgggtgcttttcaatgggggggtggcgtttgctttgaagacagaaaagggatacagaaagcgagcctgaagtttctgaagtcacatgtcctaatttccttctgggtggaaactgagggccatcatcccgcagtctgataacaggataggtggggggtctgcatgtatgtatgtgtgaatgtggcaggggcgttgcgtgtgtgtatgtgtgcggggtgtgggcagggacgtatgaatctgtttatcattttcaggtggtagcaatgccaggtctgctgtttcagagagctccccagtcggctccttcctcagctgtggtgtgggcctgactgccggcccacggtagcttagctcactctctctccctcccatgcctcggccacgtgggaccttgctcagaatccctaggtctctccacatgagcttgggtagcagctggtaagacgtggcaggattacctaatatgtccgttttcttgttggggtatcagcacagcctcagtggtgggcttgaggtttcagtaccatttctctgtcactgtgttttcgaggcctgctgagccttgcagagcatacactggcggaaatagcacaaaattgtttgtgcacaatctagaggcaaaatgggtggggctgaggcagctgcttcacatgataggttaggagtagtggctttgttcccagctcagtgaaaggtggcatggtctctcctgtccacttcactctggattctttaaccctgtgaattactagacatggattccatctccaatgtggatgcctctcttcaccacaagaatacatgctcctttctgggctgtggcttaggtatggatattgggctttgaaatcagatttctagttgttaactggagcagatcatttcacctctgtgagctttggttcctggtctgaaaaatgagggtgacagtatggtacttacataaagagcatgagcattaaatgacacagctctataaagtgcttgcactgtggctggctcgtggtaagtactcaatacataagtaacttgatattcattattgttagatcagggattatatcttccatcgtccactctgctcaagtggatgcagtgaacatatccagaaatcccgccaataggtaaattggccaatatttctcgcaaatacaaaatgcctgcatggtggctcacatttcgttctaaaacatttattttattaactcagcaaatatttatcaagatgcttcaattgccagatgcttttctaggaagtgtggagctttactaaaaatcccaaggaaaacagcacccttttctgtcttgcatctcagtttatccccacagcctcaagttagaaatgcttccctctgtgctggtttcctctatgccatcttttctttggttcctgaacgtctatgcaaataacttttctggtctgagattttcacgtcactcaaatcttctggctttcacttgcacctcttttctccccctagtctctttcttaattcataagccttacttatcaaaagcaaaactctcgggaagcttgaagctctcagtccaccctcacactttatcatgtccagaactggactcacctgcctgttcaaactggccttgttctctgatttcctttcttgcttccatgaatgggtctcccagatccatcagggctgtgtctggctgatctcatatcctcaggacccaaaattgttctggtgcatgtcaagtcctcaatcttgaatgaatgaatgaatgaatggggaaggctaccttaccagagccactcaaaccccagacctcacaaaaatctttgtctcctgctcctccttgttcagcagggggctgagtcctctcagtattagcctctcatattgtttcctcttccatcctaatccaggcttctggctttgcacctggaatattgtgcaatgtccagccaatctccctctataccatctctctccctcttttcatccctcccctctgtaatattctctttcttttctctcatttagaataaaattgagtccatactataataataatgttaataataatagctttcatttaatttctatgttttaagaagcaggcactggctgggacctgtccacttacccttactaatccctatggatttatcaccccataagatgcatgttattatcacagctttacagaggaggaaactggccctcagagatagaatacggcttacccaaggctgcgtatgtagaagcctgtgcacttctgctactttctccttccttctctctgttaggcactgtgttaggtgcacgatacaaggatgagcaaggccaaacatcaagggagtacccctgtcttcttagagtgcaagtggagagggaagacaggaaaagaaaaaagtaccaagcaaggcgacaaaggctacgatacacaggtgtctccactgacaagggtccagagccagggagcaactaagtctggcagggccaggaaggcttctcacaggaagtggggcctgaagggattcttgaaggataagtaagagttttccaagaggtcaaattggatgtaggtgggggtgggtagggaggacattccagcagagagaatagcatactgtcctggataaagagcaggatgggcatggagaaagagcaggaaatgcagcagaaaaagccgcaaaggactccaactccatggcagtttagacttcatcgtttaggagggagatgctgggggtcatcagaggcttttaggcaggaaggtaacatgatcagaattctgtttgagaaggctcacgtcataagcaatgctgtcagtgctgaatataaggaacaggcagccttctgtgttgattggttggctgggagaatgtcactcaagtacatcagagagaccagcggaggtaaagcaggtttgggcatgtgtgtcagtgttagccagaggaatggtagaggtgagaaggggaaaggtggtaagtttgatgaggtggtaagcatgatgagcttgacattctcatggaggtgtgttaggaagctggatggatgggtctacagctcagaaaggagggctgggggaagccatgcaaattctactcccttttcaaatccatttaaacatggttcccaaactaatgcacagctcatatcaacatactgggaaaatacctgaaattgtttccccagctctgaaagaactattcacacctcacccacacatttacagccatccaaagtggaatctagactgagtcagaattgagagcagattattttgagggttcagcggcagaagatgaagaaaggaagtgataacgtttctcagctgacttctctgttcgtacttccttctttaattttcctttgccccatcttggggcaaaaagcagctaacttctacagcagaaacaacatccctaggcatgtggcacttcttctatttctcttctttcctttccagtactctctcacacctgcagactaaaattcagcaccaacagtccagtcatacaactatattttatcatgggcctcccttgctcaggaatatgaaatagctccctactacctctctaatcaagttgaatgcctcactctgtcatctaaagcatcttcttctctgggccctccagcttgatttctctatttgataaaatgctgcctcacttttatggcccatttccaccccacgctttgtaatgatagcactcaggttctgggaagtgctgaccagcagaactttctgtgatagtggaaatgttctctatctgttgtccagtactgtagccacgaaacacacaggcttactgagtacttaaaacatggctagtatgacggaggaactcaattgtaacttaatgtaacctatttaattcatttaaatgtacacagccacttatggttagtggctactgtactagacaatgcagtgctaggggcttgctcatcctctctctactagaataatgtgaggtttctaaccttattgaggccctcatttctcacttgccccaaggtgttctgtaaacactgagcaactgccttcccacctttccccgccctggtctgcctgcagccccctctccaaccctccgcctggttcagacctgcttcctgaagggctgggaatgtgcactcagggtacaatgactggctcacaagtgaagcttatcatggttattattttcattatgagaaacagctccattaatagtaacagatctctttgtttactttatccggaacaagtcccacccacaaagaagagagactgttcaaagaacctaacaaggaaagttggtcaaaaccatgacaaactcaaggcccccagactttcttctctgctattttaatgatctcatgctaggcctggctggtgagcaacactgtgggctatggagggagatggctctgcacttgggatggaaagtgcccctgcttaatccccagctcatctgagaccccagctgtctccctaccctcagggtttgggcctaattccagcagtgtggaactttgtactgagctatccccactctctaacttataacaggtggcccagtgctcatagttacacaaactatggtgggatgttaacaggcactaaagaaacactggttggatgtagagtgagtggtatcctttatggatataaaacatggccaggcagagccttgttcatatgtaagcagacaagctggttgcctttctgctacaagggcatcaaaggtccccttggccaggtctgggaacataagatcctcgcacttactcctgcctttgccaggtcattctgcaacgcacacgtgctcctaggagggttttttgtttgtttgtttttcttatagttgtttttgccacaacaaagcatgaaaaatttcacagaactgtgaacaaaataccagcaactaatttcttctatgctgagtgaattctttccaatctgtagtatctttttctcttctgctaaccgcttcccacttcttcaatgctgttggagaccttcagtttcccctaacccccactgtggtcctaatgatgtctgtgggcctctgggggtggcccaaggggcctgagtccttctagccaccatgtggcacttcccctcactcctgagttggctccatttgatggcatcacctcagaagccaagtaaaggttcctcatatgccactgctagaagggggtcctccctatcatgtctgatgttgctacagttggatggtcacaaaagccacaccgggatagacttcactgaggctactgaagtgggggagaatgcctctgcatctgctggaatgcctcactcttcgattttctccaaaagttttgtgtgtaaactatctttttcatttttgcctactctctgccctctttctaggacagataagagtccttgcaaggtatagtctctgacttagagagatacagaactgtatacagtccttcaaattccctcctccccattgtattctgccaaaatctttctgtagttctttggggatcatttccacagccttagagcaagtgatcagcccacactggctgctttttaattacagatagaaggccttgaagatagcaagtaactgaggagcaagatctcagataaagttcttaactgggatgctaagacacactgatataaagcaaatcctttgtaagcaagctaccaaattgtcatcaaaatatcaaattatcttttctacatctgagcataagcactcttgtgatgatgtctgtccaatgggaagctgaatcaaatatgtcttgcaacgtgggatacaacctagtatgacctcaccaggtccctggtgggaggtaagaagtgactgccagatggaaccaggtataagggcatattatgggaactcagaccccttgtgagggtcaagggagcccagttacagtggagtcctcttcagacagcaatattggaccgaaggatgaaatgtggaaatagggtgataactccagatacaattggagatagctacagaaagactctgtaatgccatataaaactctggtgtttgaaagtatgccatgattataaataaagattgagaatcacaggcgtagaaggagatagaaataagagaatcagaaagaatgaaattctgtcctttgcagcaacatggatggagctggaggctatttatcctaactaactcagaaacagaaaatcaaatatcccatgttcttatttataagtgggagctaaacaataggtatacgtggacataaatatgggaataataggcactgaggactccaaaagtggggaaggcaggaggaaggtgaggattgaaaaattacctgttggttacaatgttcaatatttgggtgatggatacactagaaacccaatccccaccattaggcgatggactcatgtaacaaaccagcacgtataccccctgaatatatttttcaaaatcaatgaggagatgttggcaatttaatgcattaaagataggaaagaagaaagagaggaagcttgatgatggaatgacattttgaagtgaagagggaagttgaagaagctctcagtgatgactcccatccttttagtaggaagtaaagtcacctgttgataaaaacagcaagagtaacatatacttacctttgaccagggactgtgctaagtggtttgcgtatgtttgtttaatctctacaacaattccataaacaaggaagtattattatcctaatttagcaagtgaggaagccgaggctcagagaagcataatttatccaccgtcaaaaagtcaggaaaggtagaactagtctccaatcaggtgaaatgaaatgggtcgggagcagagttgatagcttagtttagctgtgtcatgagtggtccagggatggacaaaagctgaaaaagggggttggaagatggagccttcctccagcaacacttggcagaaggagaggggtgcagacactgggtattagcaagtgtggagggcagtgcaggccaaggagacaagggcatcattgaactggctgggaaataagatggggctcagaaggaagtgttgaatggggaccagggtgatcgatggagcgctgtggagggaaggaaaggagagcatggtcctgggtgggggttaccatggagacaagatgtggaggtacaggctggacttactcgaatgacaggcagaactcctgtgtgaaaacaaaagccaaatataccatgctgagtgcatgcaggttcaaggggctctggcttcaaatcctgcttctgagttctattggcagtgacgatctaactgtaaaggtcataggaaggcagcagcagtgagcgccttgtacagcataaagggctgggatactctccgtgggcaggggacagaatggcactgggcaggagaattcagaaggtgccaactccctgcaggctggccctgtggccgggggctggggtttgagtggggtccgctggagggggcctgcgttccacagcgaggttggagctaacagcttctgtcttgcggcccctcctctagccggccgctgtggaagagtgcccaggcagcttccggcggcctctgcagctgcgtgggactcaccccgagccttcagagtgaggcattattttctcctctctcttgtcagatactgactcccacgcaggaaaaaggaagcaccttttgtcagatgctgtggccacttcctcttcagaaggctccagccaacctttcggtttgcagaatgacggggcccgccgcggtgccggactgcctgtgcacggggccaccgactgcagcctgggttttattcttggcctggccctgaccgggagctggcccctcggctgcttctctggctcgggggggactttctctggctcagatccggacccctgaactggacctggttgtcgtccccccgcttctcagccccctctggggttcctctctcctctccgcccactctttgctcactgccccatgtccctcggtcagtcggcctgtctgttcctctctatagctcggtcaaggagtgtgatgactggcgagcagatggctgccttccatccatcgtccacccccaacccgctggagaggcccatcaagatgggctggctgaagaagcagaggtccatcgtgaagaactggcagcagaggtactttgtgctgagggcgcagcagctctactactacaaggatgaagaggacacgaagccccaggtaccagccaggctgtttgtcccgttcataaggcacggaggaggcgggcctggagcccgctgggatttcacttaaactcacaggggccttctcaataggaccagacacacccattggaaaggaaattgcttttccctttacaccattttctagatacataaactgagttgcaaagatgacagagtggtcctccaggaagcaccaggacgggcactgtggagtttcctacacatggctctgagtcaagactggcaacagggcggtgatggtagtgacactcagtcaagggctcagagagagtggatttgggttcaggaaaaccgattttgggactcattgatttgtttgttcagtaagtatttattgagcgtttattatatgccacacactgttctaggtacttgaaataaactatgagcaaaacagataaaaatctcttccatatgcagcttagaatgtggaggaaaagacacataaacataacaaataagaaaagtatgtagtttgttagagaaaagattagttctatgaggaaaaaataggatgagctagcagatgtcacgagttaagggaagatgtaattttaaaaaggatggtcaaatgacctcatgaagagggtgacactggggccgagactaaagaggagagggaataagctgggtagatctctggggaaagagtgttccaggcagagagaacggccggtgctaaggcaccaaagggagcatgtctggcctggctgcggaatagcaaggagggcactgtggtgggagcagaactagcaggtaggaatcagaggggatgaggtctgagaagcaagagggtagtcaggggtcaggggcacagactgctggggcactgcaggccactgtaaggacctgagcattcacactgagggccacagggaggcattgcagggctctgagcagagagtgacagtttttggtttaaattgtaaaaagacagctgtggctactgtgctcaaaaatagagccagaggagacgcaagtaatctaggtaaggggttatgatgtttaggggctcagtaggagttgtgggctggaggaaaatggtcagcttctggatatactttgaaagtagagcaaacaggatttcctgatgcagtggataaggctgtgagaatgggctttaatcctaaatcttgggcctaggtctcttcggccaacctcattgcttttttggccattgtggtgtgtgagaataaaagaggatgctctgaacaattacgccaggaccccaggtgcaaactggatgtctcagggcatccagcacagctgtcacccacctagaactcatgtgtgtggagatggaagtatgggcttggccagaaggagcttatttgggatgacagactctagaaccttctggagccagaacaaaatcccgagaaaggcaaggacaagaagtgtgtagatattgggggtgggtgggaccaaaatgaaaagctcattttggaagaggactgttttctttaagggcaggcttgaggatccattgcacatcagcaggacttggttaaccagttcctccacttaagggctctgaactctggagtctctgtcactgcagaggccagggaaggatcgcagggaccccaccacagatggggctcttgcctcatgttctgtgcatggtaaccagccttccttctctttataaacaccccagaccttattaaagccaagcaattccaggctaagatggcggttgatatgttaagacgatggaggaagtcctcctatctgcagagtgtaagggagacggcagtaacgctttggccaccccagatcaatgaaaggggcagctgagtgtgtttccatgaagtgtagagggtgagaggtagtttatataaaaggatgtgttcttttcctggttccaccactatttggccctgtaattatttcatttttccggaccccgctttattcttttataaaattagacaatactacctggcctgcatttgtcacaggatcaaatgatataaagcaggtataaaaaactgttttgttaaaacataaactaatgtcaaagggtaaaataaatatctgaaggttcttgcttctcctccttacttctgggaggaagaaacccaaagccttctcaggactaaattagcctgagataattaggtaacacttctaggatgacaaggataatttattttgaggaaatctattgatataatacatcggatcaataggtcaagtaagcaaaaccacacaacccttcaatagatggctgaaaaatgcattgataaaatccaacactcatttcagatatgaaaaatagaaaaataaaacctttaggaatacaataataatttcttagaaagaatagtgtattttaccacatgttgatatgtatcatttgattataaaagctttaaaaattattcacaatcccattagtaagaaatagccacctatatcccctccactttcagccttccctatacatatgtatttaggaactcatctattgtaaatgcaaaattagtataataaatattatttaatgaaaaaattaacaatatatcatgaattttgccccaacactaaatatgattctacaatataattcttagttatgtcaaagcaatctattatatgaatgttccataatttatttaattaattttccactgttaggaatttgggctgatgtttatactattatcacaaacaataattaagtagattccccacagcattgtttatattagtgatatgacaacaatgcccagtggtaggggctaacttatattaggctacatttatatatctatacaataaaatacaattcagacattgatgctcctaattaatactttttgaaatggaaaaatgtccataacattactgtctttaaaaagcagtttacaacagaagatgatgtatatactaatcccattcttgaaaaaaaaagcatgaatctgtatttatagaaaaaggcctagaaagacatacacagaagtattaaccgtggttatctctgaatactggggttacacatacaatttctaatgtctctttaaaaatatttttataattgaagtgtaatcattgtaaatttaaaaagaatgcacacaaacatcctatcccccaagataccaaaaagcagaaacatcacaataatcttggagccatcaggcgtaagggccctcacatacactgatgatgtgtgtgttggttggtacaacctttctagaaagtcatctggccagatttactaaacaccaaaaaattgtcatacccttagacacagtaattctgggtctacgaagttccaaaagaaataataagaatattcaatgctatttataatgagaaacattggacctagcgtccggcaaaggagaatgtaaataaattatggagccgtgtatgatagactttcctgtatgtgcttctggagaatcctgtggccctacacaaggcagtctgtgcattttttctttgagttctcagaaagatcctgtccagttttaacggtttaaggctgtgtaagtccatgaactagctttatataaaccattctagagagttgtttgtcagggaaattgtttcaaacagaatctcagcttatcgccctcaagtttctgttacaatgatggtctcagacaatcctagtagtagggtagacccgtggtcccattgtctcatctgcctgttttctgaggcatcgccacaagtggttgtctaccagcggtgtgctggtagatagttaacaactggccctctgatgggagagccgattgaagggcaacatttgctaatttctgtgtggcagatactcccatcatgactgatgcaagctaccaacattataccactgaactcagagttgagaagagacatgcaatagcaccacattatataggatttccaccacacagatagaatagatggaaataaccacaacagcagaaatgatagcaaaataatcagaaaggtgtacaatttaagtatcttcacctttttaatagaaaatatttcattgtaagcttatagaatttaaattttagtaatagctgtatttaactggcttaaaacttaacagttaagttctcatgagccaatataagcattttgaaaaatgctttaacaaggagttgggctaaaatgtagttctagatgaactacaaattggatttaaaagttatagctagagaattctagatattctggcacctcactgccacagctgtctccattgctttactgctgaaggacttgtggcctcctgcataaacatttctgtccttccatctttatacagagcccaccccagtcaacttgctaagtacaagtggctctgggcaacttgggcccttcccttcctggaacaattcttccttccctatcagtgtccccaccctcacccctactggtgtctcttcctcttacctgctttcttcttgccatttatgaagttcaagcctctcatgctgagcttgaggaaagggcctgcaattagtcatttacaccttggtgtgaacatgtttaactctcattgttacttctctcagcaagtgggacttgtaagtaaagccttatttgtaattctggaatcacactgactgatgctggaatcgtagatttcttattatctagcttttgtgatcctgggtcagctaattaacttccttgagctttacttcttcctttctccaatggggaagaataacagtccttccctcctagacttcttatgaagattagatgtgctgatacattcagggcaattagcatagagtcagacacctagggaatgctcaataaatggcatgtatatttttagtattttattgttactatttctgatgaaatgattttgggtgtcaaaagacagtttggagaggtacttaggggaggcagacacctctgtgtttgccctttccttctctccttaccagacagtgctccatcctgcctaaaagcaacaaggccttttattctggtgccataactcatccaaagtagctcagcagcacaacctcagggtcattttttctgaaggcatggatgtgatttattaaagatggtgaggactgtgtaggtggaggttatttttaaataataaaattagaggaatgtagaggaattgcagaattccactttctagaccgattttctttttcttctcctccttccccttcccccttctccccttccttgtctttcatcctcattctcctcctccatttgttctttctcctcttccttctcctgccctttctgttccttcccctcctcctcctcttccttcttgtcttgttctctctcagtcttaggcatttttatttctagatcctcaagaaacatttattctcttaggctcctgagtggatcttacttctgagatttccttaagactcttttgcctttatagtgttctctgccaccagtcatctccatcggtactttgttttgaaataaagacacgtgtgtttactcaactcagaatcaggcctgctaccttcaacagccagcgaggtgtaaattatgaataactagatccagtgcgcactaacgatgttactttgtgcagtcacttagacattcaaagtgtcagtttcctcatctgcaaagtggcagtgataaatcttgctatgctctggatatggagttgttgtgggggtctaatgaattatctcaagtgggccaggcacggtggctcatgcctgtaatcccagcactttgggaggctgaggtgggtggatcatgaagtcaggagatctagaccatcctggctaacactgtgaaaccccatctccactaaaaaaaatacaaaaaattagccagacgcagtggtgagcgcctgtagtgccagatactcaagaggctgagacaggagaataacttgaacccaggaggcagaggttgcaatgagctgagatcacgccactgcactccagcctgggcaacagagcgagactccgtctcaaaaagaaaccaaaagaattatcccaagtgaaatgcactgtaagtgataaagcaccatgcacacacatggtggaagtggcttgtttttctgataatatatctgtgtgtaagaggtcacaaatcctactaaaccctcagaccccttcatagatctgggcttggtggtgggaccatttcccaccacctcagctttgatggtgaagagcactggctttggactgacttctgagatgaactactattctggcacttactagctctatgactttgggtagattatagaagctttctgatctcttttcttcacctataaaatttacataatgatactttccttagaggactgctggaaggactacatgaataatacattcaaggtggttagtgaaggtgcgagcaccttctactcaataccccatcccctccaatggtcacctgagtggttcagtcctccctgaacccctctggcagcttggcaggtagtatggtctccacagcctcagcattgccttcacaaagaccaagtgtctcatttggccatcaagttgggtccttggaaaagtgggaagaggcaagtattggtgatgacaccctcttagctcattcttatatcagaaccttgtctttctctgggcacctgatttgctctggaatagctgccctttgatttgcccaaggcctgagtagcagaaggggccccattaaaactgggaggctagcttcccatgtccctatcctcctactctcctccccatcccatcattatcctatctgttgtccaacccaattttagtttatattaaattgctgcttatccttaaggcctgacttttcatctttcagggctgcatgtatctaccaggatgtacaatcaaggagatcgccacaaacccagaagaagctgggaagtttgtctttgaaatcattccaggtaggccaccacaggtaggacagaggtgcagtgcagaagtaaaattcccattttacttctggaccctagaagtcaaagctatattcggagagtaattcaactaactaaccaaccagcctattgagagcccacaatggttctttatacagttaatgaagctattgtagtttattaactagtatcaagtgcttgaataatgcccatgaaagaagtaggtgagcattttgttcaactctgtaagcatttcatgagcgtgtgctaggagccagttactgtacaaggctctgagccactgacatgaaaagtgcaccttctctactcactaaaatgaactcattgtagaaggagagtaggtcatcaaatttaacagttaaaatataaatggaaccacgtgaaattgccattttgatgggtcaaaaattataaaaattcagcagcctcagatggttccacccattgcatctcacccattgcacatgattggcacattggaggtgcctctttcaaatcaagagtttccttccttgaatgcatttggaacaaggggagtttgggtcatgctcctggatctgccacactgagatgcttctactcttctccctgtctcttgctcctctgctagccctagccctgccaggggctccaggactagaggctaatctggctgtgtagccttgctgctactgctgtactgaccacagcggaggaggccacatggcccctgagtgcctcttttcttcaccccctccttcccactcacacaaggtgactgtgtgcataagaaagttgatggagaaggcagcgtagcatagaggttagaagtgtccagtctggagctagcctgccctgaccctggcacttactatttgtgtaagaggttacttaatttctccctgccttttgattttttgtctataaaatggggacaataatgataatagtaaagatttaataaggaaataaatatgaagcatttgatacagtgcatgtcatatcagtgtttgatatttgggaataatctagagataattataatgcagaaaaaaaatcctaaacttggctatgactgtttatagaatacaaatttacaaaaatttttaagtttctagatgcttgcttgtttgttttttttgttttttgtttttgtttttttttttgagttgggacagtcttgctctgttgcccaagctggagtgcagtggcgtgatctgggctcactgcagcctctgcctccccagttcaagcaattctccttgcctcagcctcctgagtagctggaactagaggtgtgtgccgccatgcccagttaatttttgtatttttagtagagacagggtttcacatgttggccgggctgctctcgaacttctgacctcaggcaatccacctgcctcagcttcctgaagtgctgggattacagatgtgagccaccattcctagcctcccttgctttttcatctgaaggtctaacttcctctctttctcttcagaggaaaagcaggaaagcctgctttttcagtctctcctcactagaaatatctctctccctttccacaaaggttattctgttcttaggatgcttctcccagtgcaattcatgggacacaaccatccatggtaacatgtgtgtcccaaagcctgggttttcaatctagagtaaccctactgagagatccagctgaagattcactgtgggctttgcaccaaaaatacctactcttcaacattgctataccagtgcaggaggaaggtttgttctctcattatcacttatgtttgcagcagtctcctggcctgctagaggaattcacaaacagatcctttttctctctctctttcgctctctctctctctttctctctctctctctcacacacacacacacacaccacatctcataaggacaaataatactaaagtaataataagataggaaaccattttcataaagataccatcatcttccaaggttccacccaaccctaaagtgagatatccttcatgttataacatagagaatttttagttcctctttttatcatcctcttttgcaagatgattctccggagctaatgctggtgtaagaaatgggcttcccagataggatcctctctctgtgatcaccagttttagttgcacaaacgtcacatagaaacttttaattgtaggcatgctagttttttttttaattgggggcaggcaacaatttagggtaggcttccctctccctactgatctctcatagcataactatctattcttctattctcctcctaccccagggaatcaccaggaaggggttgttccttctgttgcatatgttatctcatttagttctcataccactttatgatctgttgttactcatttgtacgacaaattcattgagcacctcctatgagccaagtactattgcaggactgggaatgtggcaaagaacaaagcagcctgcatgcacgttacgtgggaagagactagcagcaaaccaaatatatgggcaaattatgtagtttttctgataggatagcaattatggggaaaattaaaccaaagagagagaaggtgctggctgaggtggttgattgattattgtgaacagagccggcagagtttgtgttattaagaaggtgacctttgggcacagatctgaaggcaatgagggagtcagctaagagcacagctggaggaagagcattccaggaagtggaaattgccagtacaaagtctctgagcctatttcatatgttcaaggaaggtcaaggaggccagtgtggttacagtgaagtgatggcaggagacaagaataggacattttctcaggggtgggcacagatttcataggcacttgcaggcaatgtgagaactttagcttttctgctagaaggatggggagccactggaaagttttgagcagaggtgtgacatgacataactcatgttttaaaattcttttgaattgaaaacaaaagtaagtagtgggggcaagggcagaacaaggagatcagtgaggaggcttttgcaagaatccaagtcagagatagcagtgatgaaggggctgtgaagtaagcagtttctgatcacattttgaaggtagggagggcttcatttgctaatgaattggatgtgggaaaaagaaatcgatgttgactccaaaagttttggcctaaacaatggaaaagatggatttgctgagatttgtgcatgtagcaagcaagttttttttcgggggtttgggggtaagggcatcagttttggacatattaaataatatctccattgtactggtaaggaaactattgctcaagataatttagctactgtagtgatagaggtaagaacaagatattaagggattatagaataaggactccccactcaacttggagtagggggaagaaaggtccctagaaaaggtaacatttgagttgggttttaaagaatgggtaggagttctttaggcagattaagaaaagaagagaggtccatttccaacaagagaaatagcccaaagggtaacacatgttgaacaggctgtgtttaagtcagataaattatgtgcctgaggtcagaggtgctgttcgtgagctttgtattaatgtcaggcaattcctgttaatgaaagtctgttctagcaccccaattatgcccaaatatttacttttttttaggacaacagaaacctttcaaaccccctttggttcttgtctcttggacctatcttaatatcatcaagcttcacattatttcaccctttgggacaacctgattttcaatcatcctgtcatcaggtcatcagctctcctaaccagaagagttagtccatggaagtcctcttcattcaggaacatcttgagagctgcgtgtttcccagtggggttgctcatgacagaacaaaaagacctcccaggaatcagggtaaactgagaagacatgttttaacaacatagtagactggagttgaggcatggtggagacggagcggggaaagacaccagataaattttgtccaaggtcaaatttaggagcaatatgggccagcggaatctttcatgggaggaaggacaccgacagacttgccctgtgtttggcagcaactcactggatactgacgaactggtgcttttgcatccctgggattcagttctattatctataaaatggaaataatactaactccttattctatttcaaagggatattgcaattcctagagggtctttttgttctgccctgagtatttttaacttaccattttacttctgaaaacatccagttctcaggatactctcaatgcccagtgctttaatggtcagaaaagctgatgacctaatgacaagatggagtcagaatcaggttatcacaaagggtgaaagaaggtgaggctcagtgatattaagataggtccaagagaccagaaccaaaggggatttgaaagtcttttcctgccctgcagggaaatacaggtttaggcacaactactcagctagaacaagctctctgagggagatggcctgccattgtgagaagaatggattgctgcttacgaaggcactttgaaatttaatatcccataattgaaagggatcactattgttttcttgtccccgctaagacctttttattttaaccaactaaagaaaataccaactttgaggatttccatttgcaagcaggtccacggatgaagttagagttcaagtctcagatctgatactaactaactgcatggtccaagacctgtgtttgatactctccttttccctctcttgcttctttcttcctttttcactttcccacattctttctcttcgtctccttctccctgctttctgttcccttcaatttctcccacctttttggtccatttgagaacaccaaccgaggaaacactacacctatctataatcttaggtttgaagtgaaaatggtaaagaaagttctaacaagtttcatgtatccattaactgagtattgagaacctacatttgaaaggtgttgtgtggccaggagagcagaaatatgatcaccaagcaccaattttgtgaaaaaagcacacatctattcactgtcactcccacctgaggttgtcatctcctaccctacccccacaactgagctcaggactagcttaggaaagtatccacggttggcgtgatgatctaaagtcttctaacttttatgggctgaccctgtctcatctatgctgaaactgcaccatgaacttccttttccttttggtaggaaatgacttctgtcctcttaaatgaaagcagctctcagcccaagctatgccaattgcaaaccattgtgttcaatgatttgtctgttgagttagagcttcagtaagagtgcccggatatccagttccactgaggataattcgacaatgcatttgtgttgtttggctggtagtgcttcattgaaccaagacatcaatttaggtctggttcccttctcttccccttgctctcatgttcttatcactctaagaccttcacaagtgctaattcttcctccagcctcatgggaccagaatcgcatgggacaggactcctatgtcctcatggccagctctcaggcggagatggaggagtgggttaaattcctcaggagagttgctggcacaccctgtggaggtaaggacccctgcaggctttcctgggcaggtgcctatgacatctcagaaagtaggaagtagctccaatgtgatagctccttgagcagtgctcaagggagacaaccagaaagcagttctctgcatgcccatggccaagtgctctgtcaaatgtggaggaaaagtgggctcagagcttctagcttcccaccccctgcggcacctgggtcatctcaaagagccatctccaaattaactggagggaaggcaagtcttttgcagtgagtaaatgtgtatgatatctggaagtagtgctttctcctctctgggccaaagtactctcatctgtaaaatgaatgggttggataagctgaccccgggtacccagcagcactggctcatgcagcaccacgagtctgcctggttctgggaactgatggcaacagctatgctgaaagcataagttagactgcataagtcagcacatgaaaataaagctactgtccaaaagagggatgatcagactggggaaggttcaggaattgtgtctgaagtcttgcaggtgtacagtgagttcagcattcaacacttttctgggtttcacaactcaagaatttgagctctctgggaatcctggtgatgtttccacatttgaggagggtcctgactaaagaaaacggatgcaaaaactatctgaaattaacaaacacgtgaatctagtaagtttccctgcctttataaaaatatgaaaaaaccgacaggtatgagttctcaagttaacattttccttcaactttttaggagcacgcctacttgtgtcaactccagataaccttaaatatatagttatgtattgactgtgtggcctgttattttggaaattatttagggaggctttcgtagtttgaatattaaatatttatttcattggcctacagcttccttcagaaatttcaagaatatcacaataattttgtggaaagtaaagaaaaaatattccaccagaggcattttatgtttatctttcatctactgtttacatctacacacttttttcagaatggcttaagcattttccccaagttgctatggaatctttttcttttttttttttccgagacggagtcttggtctgtcgcccaggatggagtgcagtggcgtgatctcggctcactgcaagctccacctcccaggttcacaccattctcctgtctcagcctcctgagtagctgggactacaggcgcctgccaccatgcctggctaatctttttttgtattttttttagtagagacggggtttcaccatgttggccaggatggtctcgatctcctggcctcgtgatccacccgcctcggcctcccaaagtgctgggattacaggcgtgagccaccgtgcccggcctggaatcttaattgatacatttcagcatttatttggttacaaatagaaattgtatccaatgatgttaaacaaccaagaaagatttgctggttagatacattagcttctcaaagcaaccaagagcaggaactgccaagaggttttataagagtctgggaccaagaaaggggacattagcattgattttatcctgtctgtttctctgggagcacatgacctgcaggtacataattaggccacatgctggaaaatcttagctgtgaccatccttattgcgctggattatgagattgtgagccacccttttctgttttctccagtccagtgctttaagctatctgcatagacaagggtagtggatgttgcctaatcatgcacctgctctctgagtcaaaatggtatccgtgtactttcactaggttctgtggctactgtgatgcttggctgagccttgccgtagtgaactgctgtactctgtcatgatacacatggggatttcaccctcaccgcaccccgagaccaccaccctgagaagcaagtcaagcatgagtcctgtaggcggtggaaagtccagcgaaggggaaatcagagtgcaacagcacttatttattcaaagaacagtgttgcctctgatacagcatctcagattattattattattattattttgagatggagtctcactctgtctcccagactggagtgcactggcatgatctcggctcactgcaacctccgcttccagggtttgagcgattctcctacctcagccttctgaacagctgggattacaggcatgtgccaccacacccagctaatttttgtatatttagtaaagacagggtttcaccttgttttggccaggctggtctcgaactcctgaccttaggtgatccaccacctcggcttcccaaagtgctgggattacaggcatgagccaccgtgcccagccacgtttaaagttactaaccaaaatcatagatcccggaatgtgagggcatttttaagacagtatagagtctcatttgaggccactggacaaatcagacatttgttcttcctatttgtaagttagggaatgttggccttaaagggacaaatgacgtgtcccgtgggcccaggaggtgaggggcagggccagggctcttttgccacagcacattaccacttggaaagaatctctaacgtgggttgactagatgggaaagacatgcctcccaaatattgtgaagtcactgagacatgtggctgccacctctttctagccctttgtgaaactttctttttccaaccagagcctgcccccttcccaccaccttcactactaccaccccaaaggagatggaatcctttcttgtcaaattacagcactaaccttgaaactcatctccacacgttcacccctgccttcttacagtctgttttcgacagagcggccagagtgagcctgttaaacctgtcttatcaagattcttctcagctcaacattctctgatagcttcctttctcactcagagtaaaagtcaaggctttataatgatcttacagtgcacagtctgcccaccgcctcccctcccgcatttcccttctgaccttctcccgtgctcatttcactctagcttcaccagcctcctcaaacatcctacccgtgttcctgcctccaggcccttgcacttgctgtttccttcgctgggaatcctctttccccaggtagctgcatggcttggtcccttaccgtcttcaggtctttgatcaaacatcaccttagtaggccttcctctatgattctgtttaacgttggaccccttccttacccctcagttctgcctcgctttgctccttggcacataacctcttctaacatgctaaatatttcactcatttgttttgttcctagctagactcccctcactggaatgaaagcttcaatctacttggcaggaattgtttttctcttttttgtgcagtaccatatcctagaatctaaacagtgctcaataaagatttattaatcgaatgggtgaaagaatcaagtcattttcccatagcagcactatgttcagctccctcagtaggctcttctctgttagatgatgatcagcttatctgagagattattcagtaaatgggttgtgtcctctataattataatatcttcctccaagtatgtcggtggtgagtctcggtggagctctttatggtgcaaagacctcccttggagaatctgatgaaagctatagagactctccccagaaaaatacctagacacaaacaattttgcttctgacagcaaaacattttcagacacctgtagcccgtctgtacaccctagggaatgaatcccaattttaaattttagaagttactctggtgacaattgtgcagagccgatgcctcttctggcttgccgtccccttttgggctccttttctcccttgactggagagatggcccacatagtcttcacggcattcccaacttcttcctcagggctcctcctgcctgtagctggctctgagtgttcctctcactttagagggcagcacattggtgtttcagcctttttcttatcagtgggctaatttcttgccacccttctctaagggcttgtgacttctgacaactcattctcagcttactcctgcccatttcctctaaactactccttccttttagtaaggcaggcatgccttctctggatctccacactgaaacctggtccctgtcccgtctccagggagcaagcagtccaaattgcaaatcatcacactctgtccagacctgcttttgtcctcttcctccagagatgagccatctgaagttttgctcaggctattgctgagtgaggaaacaatgcattacattgttctcctttacccaacccagttttaaagtcctgaaacaggtcctatgtttttgaaattattattattagtataaatttatggagtacaggtgcaaatttgttacatgcatagattatgtagtagtggccaggtcttttagggtacccatcatccagataacacatattgtacctattaagtgatttctcatcatacaccgccttccatcccctcatccttctgagtttctgttgtccataattccatactctatgtctgtgtgtacacgttacttagctcccacttataagtcagaacatgtgatatctttctgtgtctgccttgtttcacttaaaaatggcttctagttctatcgatgttgctgcaaaagacatgatttcattctttgaaatgtcatatttactattctttggctgaacagtaagtataccattgtgtatttataccatattttcttcatccgatcatctgttgatggacagttaggttgattccatatctttgccattgtaataatcatgtgagaaacattcaagtgcaggtatctttttgttataatgatttcctttccttttggtgtatacccagtagtgggattgctggatcaaatgatagttttatttttagttttctgagaaatctccatactgttttccatagaggttgagctaatttgcattcccaccaacagtgtatgtgttttcttttctctgcatcttgaccgacatctgttatttttttactttttggtaattgccattcagagtggcgtaaggtgcgatctcattgtggtttttatttgcatttctctgatgattattaatgttgaggatttttttcatatgcatgtttgtcatttgtatgtcttctttcgcaaattgtctgctcatgtcctttacccactttttaatggggttattttgtttattgttgttgagttatttgagctccttgtagattctggatattagtcttttatcatatgcatagtttgcagctattttctcccatttagtaggttgtctgttcactctgttgattcttttgctgtacagaagctttttagcttaattaagtcctatttgtttatttttatttttgcggcctgtgcttttgaggccttagtcatgaattctttgcctagaccaatgtccagaagagttttcccttgattttattctagctttactctaggttttacagtttcagatcttacatttaagtttttaatcatcttgatttttgtatatggtgagagatagggctccagtttcattcttcagcatttggcaatcagattttcccagaaccacttattgaaaagggtgtcttttctccagggtatgttcttatagactttgtcaaagatcagttgactataaatatgtggctttattgctgggttctctattctgttccattgatctgtgtgtctgtttttataccagtgacatgctgttttggttaccatagccttgtagtataatttgaagtcaagtaatatgatgcctccagccttgttctttttgcttagggtttctttggctatttgagcccttttttggttaaatataaattttaggttttttttctagttctgtgaagaaatgacgttggtattttgatagaaattgcattgaatctgtagattgctttgggtagtatgattattttaatgataatgattttcccaatgcatgagcatgggattttttttatttgtgtcatttacaatttcttttgtcagtgattctgtagttttccttgcagagatctttcatctccttggttaaatatattcctaggtattttattttctatagctattgtaaatcagaatgccttcttgattttgttttcagctagatcgttactggtgtatagaaatgctactgatttttgtatgttgattttatatcctgaaactttactgaaagcatttatcagatctaagagttttttggtggagtctttaggtttttctagatataagatcacatcatcagcgaatagggataatttgacctcctcttttccaatttggataccacttattcctttctcttgcctgattactctgggtaggacttccagtactctattgagtaggaatggtgaaagttggcatccctgttttgttccagttcttagagggaatacttttgactttctcccattcagtatgatgttggctgtgcatttgttgcatatgacctatattattttgaggcacgttcctcctatgcctagtttgttgagaatttttattatgaacagatgctgaattttatcatatgctttttctgtgtctgttgagatgatcatatggcttttgccttaattctgtttgtgtgatgtatcacatttattgatttgtgtatattgaatcatccttacattcctgatataaaacttatttgatcatggtgtgttatctttttgatgtgctgttggatttggtttgttagtattttgttgaggatttttgagtctatattcatcagggatattggtctgtagttttcttttttgttgttgttatgtccttgtctggttttggtatcacggtgatactgaccctgcagagtgagttagggagaattctctccttctcagttttttggaacagtttcaggagggttggtattagaacttctttgtatgtttggtacaattcaactgtaaatccatctggtcctgggtttttcttttttggaagatttattgttactgattcaatctcactactcactgttggtctcttcagactttctatttctttctgcttcagtcttgggaggtatatgtttctaggaatttatccatttcctctaggttttctagtttgtgggcatctagttgttaataataatctctgatgatcttttgtatttcgatggtattagttgtaatgtctcctttttcatttctgatttgtttgtttggatctctttttttcttggttagtctagctagaagtctaacaattttgtttatctttttgaaaagccaacttttcattttgttgatcccttgtattgtttctttggtttctgtttcatttagttctgctctgacctttgttatttcttttcttctgcttattttgagtttggtctgttcttgcttttctagtttcttgaggtttgaagttaggttgttaatttgtactctttctactttttgatgtaggcatttaatgctattaacatccctctttgcactgcttttgcagtagcctacaagttttggtatgtttttgtattttcatttgtttaaaaaatttttagatttctatcttaatttcttcattgacccaatgatcattcggtagcatgttatttagtttccatgtatttgtgtagtttttgaagttcctcttggtattgatttctagttttattccactgtggtctgagaagatacttgatatgatttcagtttttaaaaattttttgggacttgttttgtggcctgacatatggcctgtcttggagactgttccctgtgttgttgagaagaatgtgtattttgcaattgttatatagaatgttctgtaaaagtctattcatcccatttggtataaagtctaatttaagacttttaaatttattttctgtctagatgatctgggtaatgctgagaatggggtgttgagttcccactattactgtgttgctgtcaatctcttttttagttttaggtcagtaatatttgtttcatgaatctggatgctccgtgttgagtgcatatgtatttagaattgttatatcagttcatttatatagttccaaatgactcactttgttcattcctttttattcttttttctttatttttgcctggctggattatttcaaaatacttgtattcaggttctgaaattctgccttttgcttggtctagtctgctgttgcagcttttgaatgttttctgtaattcctccaataaatgtattttgttctagaattcctgtttggatttttaaaaagatatctatcttcttggtaaatttatcattcatatcctgaactgattttcttatttctttgtattgattttagatttctcttgcatctaattaggcttccttaaaatcaatattttggattctttatctgggattttgaggagtttttttggttaggagctattgctagagaattattgttttcctttgagggtgtcatattacattgctttttcgtgcttcctgtattgttacattgatttctgcacatctgaagcaatagtcacttcctcttatttttgaatttacattcattatggggtggggacattttttcttgaagatgtgactatgatgttggttgggtagggccatttgactttgcttcttagtgtgtgcagtggtgaagatgctgtatgatttccttggtcataaatagccttagtggtatctatggattccttagtgtgttagggtgcagttattggttactttttcaggtttcagtggtagcagtggtgggccaagtgtgtttctccttgagacctcaggcagcatatgctggcacctgtactggcagttccaggcaagtcgattcttgggcctgtggggggcttttttggatgctgattgtagtagtggtgtactgggcaggtgagtgggcttttgaccttttgggcagcgaggatggtgggggcagtgggtataaaggtggtcatgaaatgttcttctagttctcaagcacagtgcttttgtgttagccgttgtttcaagtttcaatgggctgtgtgggccagcctccaggctagtagatggtgcttgcaggtaacaacgagcggtgggggtagcatggagatttatgcccgacctctgttccccagaagaggtatttgggtaacccaggtggtagttgggttgtggaacacccaggagcctggatcccacactctgtcttggagtagggggcaaagttgggcagagctggaccaagcaagcttgtattcaggccctccaatggcatatgcatgcaccagccttgattagggggtagaggaagtccttaggccgcttgtgaaatgcttggtgaggggcaacctttgctgtcctgaagtcttaggatagggaggatagggctgtcccagtggccactgctttggcccacaggaatgagacttgctttcgtctcacaccccagtcccagcaaagttccctcctccatcctggctatggcagccaacttggccacccagtcagtcctggcaggctgcacctagtccacaactcagtcctaggccataggagatgccattcagcttaaggccaagcctccacaacaactctcctcttgcttaggacctgggatggtggtgtgcctggttgcaatgccagtggctggagcccactccacacttgcttctcagaacgggccgcaagggttcatcccccgctcaagccccagtcctgcaagcaccacccaagttctcccatgcacagcctgtaagagctccgatccagaatgttgtcccacagcagccagccaggtttcaaaaagggtgtaggacattccctggagcagttccatatcatagtcttcttgccactccccaggttaagattcgtggtgtgggagagtcaaggtgctctcctacggcctggattgtataattccccagtgggaaagtggacagcagaaaggcactcactcaccctctcccatttgggggattcgctcccctttcccagctggcctcagccacacagctttcctgttttctttcttcctggatttcaaagcttcctctcacttttttgttgaactcccaagttctttcttgaacactgcatttaaagtgcagttgtctgcacacttgcttggtttctctaagcggatgagattactggaaatgcttgtagtcagccatcttgaaaaaaaagatcttgtgttttaagcatcattgtgtgtttgccaacaggaagcatactgtatgtaaatattgaattgttatataccttggatttcttttctcctttcattcttttaagttctctgcacccttatgagcatgatttcctaatccacagcacaatttagcctggaggggtgtgcaatcattgttattccatgtgttctggtctttctcaccagctacatttgatattaaaatagatgatatttacttatttccatgaattccctcatctctcctgccctcagctcctaacaacagacagatacttatttattcatttggtcaacaactctttctttaatatgtgctatgtgcccagttctatgctaacactggggcacaacagtgagaaagagagagaaagaggagagagaaaaaaaaaaagccaaagtcttttctctcaaagagctcacaagctaggagaagacacagcaattacttttaaagagccaagggaaaacatagttacaactgtgaaaagagccatgtgggaaaaacacatgacactatatgaggaaaaaatatctttgtcaagtaggtcaaggaaggcttccttgaaatagtgatgattaagcttaactctggaaggccagcagaagctaactagacagaaaagggggaagcagaatggtgtcttagtcacagggaatagcatgtgcaaaggtcctgtgacagaaagaagaacaggctctggagtgaggggagggtaataaaaggggagatagctttgttaaggatgttggtcttcatcctaacagcaataggtagtcattggggatttcaaggaaaaaggtgaaaaaaatcagattctatttaaaagatcattctacttgctgtgtggaaaatggattgggctggaggtggcagatcagaatgaaagcaggagaccagatatgaaactcaagccattgtccaggcagaaaggacagatggtgggttggacacgggtggtggcagtggagatgcagaaaagcaaacaggtttgcacaatgttttggaggcaacattgccagggggtgggagtgaatttgatatgcagagagaatgtggagtcagatgagtccgtgattcctggcctattaatgaatggagaataaacactgggttggcagcatgagacagccccggggcccttcctgacaaccttgcctgtctctctgtaatgctgagagcctgtttgccatctcctgggtatgtctgatagggttgctgcactatttactgtatctgctcatcaggaggacaaaatcatctcagtctacccaacaaactgccttcaagatcattatctctgaaggcccccatggagccatgtgcaactctgaaagcatttccagggaatggtgggctggcttcataaacgctaagtgaaattctgtgtttctgccagacacattgatatatagaacaatgctggtaagggttcccgcgtgggattttttttaacccacctgggaggtatcccctgaacggcagttgacaattagctgctaagtaaaaggaggcacttatttttattgcggtccttgacagctttatgttcactgtttaaaagctggagagtcctgtgtgtaaaggtgagtggcgaggggaagtgctgggggaagaagggccgggagggctggggcaggtgcagacagatcccatggtttcctttttggagtcagaacctgagcagtatttgcaagcatgtgctgatctggaagtgagagaagagggttcttccagtctggggaggagggaaggcctgaggctggctcatcggaggcgtgagtcttcggccctgccatgcctcacatccccaggatgccgcggtgggaactgggctgtggctttcctgccctggcactgcttgtttgctgggatttcaggaggaaaacccccaagctccgaaagaaaggtatttcttttttattttgtagttcacttcttccactagaagactcgtttcccagagcctctaccctctcctgtcaggggtggggagcgcttctggaactgataccctgggaaggaggtatcagtgctgagcgggcaggcacagtgtgtatgggggtggggagctctccctgaggcctgggctgggctagaggcagggtggggaggggctcttgtcctgatcttaggagtgtttcagtgatgacaaaggaggaccaaggtagggagggaggtgacagttgctctttctatttccacttccccaaagcaacccagtttcctggagttttccagcaaatctaaggaaggggttgagggttaaggggtggagatggattgtggggagagctagggcagttactagtgtggtagtgaggcctcacccttctgtggttgttcaggatggggtccaaaattttaggtctgaggactggagacaaggcgaacatggtatgaggggaggtggggctggcatgggctggcatggtctggcattagaggaactcccttgagactttatgatctctgaacttttattccattagctttaaactctaaagggaaataaagcactgaatatagaatcacagggtaaatatgacctcggaaaaattcctgactcaaatctcagttttctcatctgtaaaatggaacaataatatttactttgtagagttctcatgaggactaaatgagatagcacatgtgaaagtatctggggtcagttctcagcataaaattaatgtcattaattacattggttaatagttataattatcatattacatatattataattacattatggtaattatattacttataattattataataaattcatgaaaatttatacctattaagatggaaatgctctgctaatggccaaaggggtgacaattaggacccagaggtcagacactggtataactcaggaccaggtctttggagttccagggatgtttctgattccaaactcctcatgtgatctgagattaagagtgacaaaacctgacttagccaagctaaaaaaaaacaaagatgatttttctctcatgtaagaagtgacactgttggtcctgatgtctccagagcatccagtggttggttcttgttgagagaatagctttgacggatttctaggctgcagatgtcaagttcaaagtcttcatcatatgggtgatatttaaagtggtgagactctgagaaagtgtgcagatgagggagggaggccctgggaccctccaacatgtagaggacagcaaggacaggaagaatcctcagaggaggctaaaagcatctgatgagacacacggagaaccaagagggactggtgtgccaaaagccacatgagaaagtgtcccaagaagaaggaggtggcttgctgtatcacttgctgctgatagagtagttaagatgaagacagagaatttcatctcagattttaaaatgtaaaggccattggtctccttgacaagaataggtttggggaagtactgagtagagaaaaggggcagagaatgggaggaatgggaggcagcaggtagtgacagctctctgaggtccatcacataccaggttctgaaaacagatgctgagccagatggactgtctgcctttgaggggtccacagtccagtggaagagagggatgtttaagtgaatcatcataaaattacatgacagtgataacatcgaggaacacacagggagctctatgagtagaggaaagagtgaccagttttctctgagaagacatccaaattcagaagactgggtttccaggtggagagtaggaggaagggcattctcttgagaattttttaaaagcaaaaaccatttttcattcttcctttcatactctctaactatcaaagagcctggcccacagcaaatgctcagcctacatttgttgaatgactttgtgaattctggtggaaggaatttgcaagaaacagagttgcaaaagaaaccattataacgatataggcagcagcagtgggaatagggagcttgtttaaagcatatttggaatgtaccaacctaggccgggcgcggtggctcatgcctgtaatccagcactttgagaggccaaggtgggcagatcacgaggtcaggagatcgagaccttcctggctaacacggagaaaccccgtctctactaaaaatacaaaatatcatccaggtgtggtggcacgtgcctgtagtcccagctactcgggaggcttaggcaggagaatctcttgaacccgggagaaggaagtttcagtgagccaagattgcgccactgcaccctagcctggatgacaaagcaagactccatctcaaaaaaaaaaaaaaaaaaaaaagaatgtgccaacctatttggggagagtgaagagtgttgcggataattctaatgctcacaattttgctaattgggttagttaagtgcaggtaccttgtattaatggctttgtattttcagtgcctaggagagtacctggcacttgatgatggaatgaagctattgcctttgaggaaggctacaggagaagcagtgatttagggatgggatgatagtgagattagagaagatactgggagaattgccattagacattgaacttatgggaatagaggagaaagagagagagagagagagagagagaaaagatggaaatagatatgatataactacatatacaatgataaaataaaacactttttttatgagtataatactaaagagagaaaagcaaatgttggtcatttgcatgagagctgaggtgggggattattctttcataaattatatctatcaatccatatgtacacacacatatatccatatatacacatatatccatatatacacatatgtgtgtgtatatatatacacacacatatatacacatatatatacacacatatacatacatacatatatatatatatagagagagagatctggaccagatatgcagattaataagttataagtttataggtgatatctaaatgtgtggaatcatatgcactttcctaaggagaatactagagtgagaagaaaagaagcctgagttggaatcccaggaaatgatgcaccaaacgagcaggtggaagatggagcacagtcaaagacacttgaaaggagtcatcagtgacatgagcatagaacaggaatgattggatttattgcaatgtagggagaaagtattgaagaggaaggagaattaacaacatcagtcttcagagaagatcagtaagtagggtgtggaatgaacattaggagagcactagaaatcttagtgagcagatttagtgaagaagtgcaggctaatgaaaccagattgtgatgggttgagaggctgagtagtgagtgataagtgaggaagtggggcagacatctctctagaagtagacatttttattacaagtatatggtaaagagaaggaaggcaaatgttggtcatttgcatgagaactgaggtgggagattattctttcataaatggcaaagacttagacccacgtgggatctttcaattgaaagagaaaatttcaacatacaaagagaaacagtaagtactggaagagatggaaggaatggaacccacagttcaagaaggcatcatcctagatgaaaggtagggcccttttcttcctctgggagaagacaggaacacagaggagaaaggatgggaaaggcagggactggagatgagggagttcactcgtaaccctccatttgataatggaaggaaagaggagccaagatcacctgttgagacagagaagggagggaatgggtggggagctcaacaggagtggcaaaaatttggaaccagtgtcttgcagagattggaaggataaatttccacaatatggttgtgcatggtcttttgtagttctcagtggcctgatgaagacacgcaaagggtagtaggaagcagcagggcggggatgttgaagaaaaaagtatgggtcagattaatattgaaagggctgcatttgaggcatgagagaaatagaggatgaaggcaggacaaggctgatagactgggatgaggagaaaagctagagaactagacatatattaaggtgcaagaaggagcttggccccaaatcatctgcaaggtggagcatctcctataagacctcagaaatggagcttgaatttgaaagctttgacttctctgtgcacatccttacattgtgtttgtgctatctttccccatcaagtccagtggacctctggagcctgagtttcaactgttccaagagacatctgcctctctcattgaagggcccctctctggacctctcaaaagagaattttcctgatgctatctggtctgttttaagtcggaatatttcaatcatgtcctatcaatttggtgaaaagatctgtccagctccttttacagacaaatagaaacctaattccatatggttattgaaattttctaattgtttctcaccatgttttgtgtgacccctcaaaggcagacagtccatctgttatgttattttcataacttgttggcaaactcattaaaagcaggaacaaggtcttccatgtcccttgtctgtacaacccattccatggaacctggtgctggcacatggcagggcactcaatgcatgctagtgggaagctgaattcatatatcaaggagattcctattagtgtttaaactaaagaaatgccgaataaccattagtcatgtgaaatacttgcttaaagacaaattgattcattaaatccttcagcaaaatttgttgactgtctaccttttgccaggggttacactagacattggggatgaaaacagcctttcctcctattctcagtagcagggagcttacaatcatgcagatgacacaggtacatacaaatcatgatcacagagtgcgggaaggattgggatattcaagaaacaatacggtgcacagagtaggatgtagtccctccatctggatgtcaggaaggcatggcagatatgatgatatttgagaggggccaaggaggagaaaaagaattttgtcctctttgtcctcctggtgcagccagggaagggggagagcagactggacagggaggagactgttcaaggacatggagactgcagagcattacgttttggaaacgtcagtgtgagttgcttcttggggcatggcaggacatcaggccaggaaagcaggtgggtgccaagccttgaggaatgccagccttgattctcaaactttagccacagaagtatctaatcacagtctcaccgcaatgcaataagtgaaacgaacaacagccaagcagatttggtggtagtggggaatacagaggccacctattcagctccttctagattccacactctcacctcccaacacctgatgtgatgaaagaggagtccctgatgaactgccagggctttaaatgtctatttgaaaaccatcactgtggcagttgggagagaagcagatgagtactgaaaaccaagagaaaggcgctcaagcagaatgatgctttagaaaggcaagcagcaggagggtttcgaacatgatagagagaagagactgtagcggttacaggtgagagaggaggctggcctacgctgggtagtgggtaggagcggaaaagaacatgagggtcaagagcctggtacagctctatacaggtggaatccacaggaactcgaggtgggatggaggggaccaacgtgagagagagaatcatggggagagtcaagtgactttgcaaacggatgtcctagggattgaagtgctgggtgcagcagagccctgattatggcagagggaaagtcacgcaggacaggacagaagccacggcctgtcttctgaacctccagggtatggaagcctggtgggagaatggataggcagtggttgtcctgatttgtaaatttgtcttctcacactgccggtgcggggaaactgtggagcaaagtttctccacgcagacagagctggggtggagctggcccacacttgctttgctggaggcagggtaatttgggaaaatatttttggaaagcaatttgcatgccatcaagttataaaaatgttcaaacctcttgacccagtaattctacacttgggaatttgtcctaaggaaatagttcaaaagaatgaaacgcttttgttcatgcatccaaatgttaattaattagaaattatgcattgtactgcatacattccaggatctctgccaggtgaatgaacgtgtttgctgtggcaatgtttataattaggacatagtaaacaacctaaattattttaaatgccacagtggtttagtgagatgaaacatctatgtgatagactacagtagtccctctttatccttggggggatacatttcaagaccgcagtggatgcctgagatctcaggtagtactgaaccctatacacattatgtcttttcagtcttataactgagacaactactaagtataactgagacaactactacgcgactcctgggcaagtagtgtatataacgtggatacactggacaaagggatgactcacatcttaggctggaccgagcgggaccgcgagagatttcatcatgctactcagaatgacatgcaatttaaaacttatgaactgtttgtttctggaattttgcatttaatattttcagactgcagttgaccgtggataagggaggatgccatactgtgttatgctttactactctgtgacgccagtggaactcaaaacggcctgcttgctgccgtggttaaggcatattgttgggagttcactgcctaggcctgaatcccaactgtgtcatgctctgagctgcctgactttggcaagtgtctaaggctcagtgtctttaacagtaaggtgcgtgtgacattaataccatctcatggggttgctgtcaaggttaaaggacaaaaagtgtgcaattcctagcaaaagaattcagtaaaagccaaccattattttaaatatgtaagaaatgtgggtcaatataaaaagactgataaagactgcctcaaatttacaggcccctatttatagcttcaggaaatattctgagtgatttatctcccatattttgtctagtatcattgcaataaaacctgtgaagacacaggtgacacagaaagtcaagaaatagttcatccaaggaagcacagaatgacgggcaggttctgtttgctctctcctcagcagtgtttggccagcgcttggatgagactgtggcctatgaacagaaattcggcccccatctggtgcccatcctggtggagaaatgtgcagagttcatcctggagcacggccggaatgaagagggcatcttccgtctgcctgggcaggacaacctggtgaagcagctgagagacgcttttgatgctggggagcggccctcctttgacaggtacattgccccactgcagtgtcccacctctgccctcccctctgcttggcttggctgggagggcctctccattccagttgagctatgggacttgcatagagacttctaagagccctggcttacaacagaaagagcctttgtttcgcccatgattgggaatttgggagacgggagcacagttaggagagtgtgcagatagtttatgtgacagatgatgtgaaccagaactggaaccctgctgggcagattcaggtgatgtttaaggcacaggagaaggtgatgtgcagaggaggggagaaagatgggacgttgcctgaggctcacccttcaggacagatgaggaacatggaagagctgagctgtacaaacactcagtgtagtggagaatgcaccagatctatatccaagggcaccagcggctttcgttagcattccagaagtggctagaaccaggacttcttgttagtttcctggatcacagtactacgtgattctgactcagttctgagcccttttgcaggagcacatcctgatatcttggccgcctggcattcctaagtgtggaggtctcccagccctgtttggggcatatcaggcatagtgacatttcctcccaccacccccttcctccccaccttctccagccactcagctgaggtttccttctctgccacactcagctagtaaaatccccacccgatgttgtgcaatctccaccccagttgcctgcgtgaacttgtcctgctggcataagattgactgctctttccaaattagcagcccataaaccaaggtttaataagatgggcctgaactctacccagtttccaaaaatgaaagttgctaagcttattttggacaatggggttgggttgattctgagaaaattgtgaagacctaagtgtcatcttgtgtagaagctccctcacccctcactctaatcaccaacgccgcccatttttcctccaaagcttctctgaggtctatatgtttctctccatgcttatggccacagttgtagtttggacaaccataggggtgtctttcttgcccttaataagttaatttcccatgggtgctatattttagcaccctaggaagcaagagatggggttcttattggaacaatagcccgttattggcatcaaacacagggacctttcagcagcaccataaactgcaccttgttatcaggcacttgttccattatgctcaccacctttatattcagtttctttttatgttttcagttaaccttggcctgaagaaagatacaggtgggttgttgctagagcaatgccatatagtgtgccaaaaggaatagaggtgattgctgggatatgccaaataactgccttaggctctagcctatgcactatggagttggcatgggtggtggtgtgggaatctttgattattttgaaatatttgaggctggaagaaggaaaattaccttaccttgcgacatctccacccctagaagtgaggggtagggtttttacacatccagaaataggaaaggtcatcgggggcttttcaggggcttcgcaggggcaactcttaggtccacataacccttgagaggacaagtctgatttgggaggtatgactgactcttatttgattcttattatttagttacatttgggcatatttaggagagaccaggtcttctctctcctattccactcatgattctgaaaaccctcttttcccctttttctgccctctctccacccccttttatactcccctacttctcattccatggtgtgttttggtgttgagggctgtgccccgcaatgggcagagcatagaatgccggatgcatagggtagggaaaggaggggaggggcttacagggatcaggctgactttgggatcatagaattgacaaaaccaataactcaagacaggtcaacaaaactggcaaattaactctgaagtgaaagtgaccagtgttagatgatttcctgagagtgattctggcctgggagtgggagaggaagagaccagccttgagacagtgttaacctgaattgtgtgtgggagttctgaagaggggcagtgtgaaagggggtggaaagagggcaggaaagggggaaagggagggttttcagagtcaagagcagaccaggagtgagaagctatggttgtagctttttctgcctcctataaaaggaattctaggagtcagtgggtggaagaaggggtatttgggagagcaaggagctccctcttgctgtccccaacttcacggctgtgggaactcacccagatcctctgcattggttatgtgctggattccaccccaagatgcccccattacctcactagaatgaaggtgagcaaagttgctgtttggtgagactagtgcaggtctttctggtctccttagacacaaaaatgtgaactttaaaatctccttgccaagtttctaccaggatggacactgcctggctacaaagctaacacacttctcacccctatgtgtctgtgagaaatgcacttacagacatgccacattacaagcatcaatgcccccagggaagggctggcagaaccatctgagtcttgggtaatccctagtgcatcagccgttgaacccagaagccacctggctcctgacttactcttagcccttgattaaaaaaaaaaaaaaaaaaagaatcatttaagggtgctctattgggttagaggaacagcaaactcagaaaaaataatgctacaaatttagaccataaaatagacatctgagttagccctagtacaatggggtgctcacattaaaataaaaatttatagaaataattgtttaagttccatggtgttaagtgctaaaaaggaaactcaacactatgaaaacttagaacaggggcttttcacatggtcttgtgtatttagggaggtccccaagaaaatgacatttaagctgagacccaataaacaagaatgagagttagcaaggcccagcagtgggcatggcttgtcaggattatttttggtgaaatgaactgggaagctttctgtaagtttcagtgttgtaagatgatttatatagctaattttgctcttttattataactttgaagtatccatggtgtagctgtatttataatccctttctcttttctaatgatggatgcttttgctgtctaaatttctcctgattaaactgtctaggtgtcttttttattgttgttgtttctcttcaaaagttcaaaagatccaatttcttttcttttcttctctttttttttttttttttttttgagaccaaggctagagtgcagtggtttcacccaggctagagttcagtggtgtgatcttggctcactgcaacctctgcctcctggattcaagttattctcctgcctcagcctcctgagtagctgggattaaaggcacctgccaccacgcccagccaatttttgtatttttagtagagatggggttttgtcctgttggctaggctggtctcgaactcctgacctcaagttctccacccgccttggcctcccgaagtgctgggactacagacataagccactgttcccagccaggatccagtttcttgaattatcctttacactgtttcttccctttcaaactctgttttcttcactcattccattggtgtgttttggtgttgaggactgtgccctagagtgggcagagtatagaatgctggaggcatagggtagtgaaaggaggggagaggcttacaaggatcagtgtgactttaggataatagaattgaagggatttggaagactgattggatgggggtgaaggagaggtcccaatcaaacaggagtcccaggatgctgatagagacaaatgggtggattgcagtgtagggactttaggaagatgcaacttttggactttgggagaattctgctcctgcaaattgtcagctgactgtctttctgccactttctcgggaacttctcataacatattttgacaaaagtactttttctagcctggctttgccttgggtatttttgggcagtgactcagcagggaaggattttccagaatccccatgttaaatgaatggttcctaccccagatttcctgagggcagccatggagcatagagtgggctctgtgccagcccgtgttctcctattgaggtagagttcacaggctgcaaaggggaagccttttcagagacagctacaacaactggctgtcaaaaccaaagtaaaatgcacacaaagcaccaagacagagctttacaatcaagccccagtattcttgcttctgttgcctcacatgcctcccttctcctcctcttgtccagatccacccctcccttccctcctaggaccaggagacatgttctccagcctattctatatttctcatcactgaaatcaaggagattccaaggttattctggacctcttgccacatcacagcttttcacgatgctaccagggctgctacctaagaatgccaggttttatcaatatgaaataaacaaacatttcttcaataatcagcttcaggaatatggtagtgaatcttattttcccttgtagtgttgcagaatcaatgcaatcgccttgtaagccaggggtcaacaaacttttcttaatgggccacatattaaatatttaggctttgcaggccagatggtctttattgcaactataatactctgctcagtacataaatgaacaagtgtggtggtgttcttctataattttacttacagatgctgacatctgaatttcctgtaatttttacatcacgacacactcttcttcttgtgagtgttttttcccccagctatttaaaaatgtaaaaataattcttagctcccaggctgtacaaatagaggcagtgggacagatttggctcctggcccgtggcttgccaagccctcctgtaaatggagaagctgaactgaacagccgtgcctctttcagtcaatcaggcccacggggaggcgtcctctcctcatgctccaggctgacacacatgctgcctgcctcatgccctaactcctcaccgcctttcagagttcatctgaggtactctttcatctgacaagtcacctatgtgttcccatctctgccttgggtgttctttttccatacttccataggatcctgggtcctgggcttcccatatcatggcattagccgcacagtattgtaaggacattttaatacttgagtccccagagttctgtggctcgatggggccagggctccatccctggattggatggctactgatgtcccttggattggctactgaaatcccagtgcttgacaagtatcttgcagtatcttgcacctaataggttttcttgatgcttattgattgagtgaattattgagtaaatacgtgagtgaacctcagaactattttaagcactctggaagattaaagagaagaatggaccaaggatataaaggagttaacacaagcaatattagagactaattagacaatgctaattgtgaggcactaaatgacttgaagaaagaagaaagcaataaagacgaaaatcattaaggaacgtttagtaaaaatgtagaccttgaacttacctttgaggtagttgggtggaagagacagaggaacatttattcaagaatgttgttccagaagggcgaattaacaaaaatgttttggtctgattcttctttatcagactactcctctgcaaaatttccctttgtaatttatggttctattcactgaatcatcagaatggaagagaggaacatcctaaagtttttctttcaaagagtttcacagagcgttgcttattttcttccagagacacagatgtgcacactgtggcttccctgttaaagctctacctccgagacctcccagagcccgtggttccctggagccagtacgaagggttcctgctctgtgggcagctcacgaatgcggatgaggcaaaggtttgcatcttagagttagttgtcctgccttagaagaaagtgattggttttctggacactaatccagtaggcaacagtgggtcaaggggcctgtactttttggtaagatagtcaaatgcaacttcctcagcaacaaaaggtatatgaactcaatcataatgactggcaaaccacagccttcatgagatgcaataatccaataaagaattggaccataatcaaatactgctagatcacattaaaagtagtgagaaaaggaggatacatcggaggacggtttcaagcatgatggccttgctgagacttgctgggacacaaggacaggctggaaggcaggtgtgaggtcacatagctcaagctctacagcagctgtgagtgtcaggcgtggtcatccaaggaatgcatgtgccagggagaagaaggacagggagggttttttgattgtttttcttttcagccacagctgcctgtagggtctgtaaccaccatctgcaatatgcttgtgagagtgcacaagttcactaacaagatttttgatcctgtataaatttatttctagagaggccttatagtcaacaatgaccacactgtagtcatgttattataatcaaccaaccaaccaaacaaccaaagaaactgatgaaacccaaccaacaacaataaaccttgatgatttttaaacaagattttcaaatccaagtgatccatgaagaagttgatgtttatatcgactatgttaaaagccctctctggcaaaatggtgcacagaaaaatctataatgagacctagatttaaccttgattttgccattagacaaattatgcatcttttataagactcagtttatttacttagaccaatagaactttctatggtaatggaacttttatatatctgcaccgttcaatatggtgaccaccagccacacatggctattgggcatctaaaatgtggctagtgcacctgggaagccaaattcctaattttatttaattttgatttagttaaatttaagtagttacatgtggcaagtaactgctatattagacaccacaaacttagataattttcatagtaatatcagccatgcctaggattgttttgaggacccagggatatgatactggtgggtgactttaaaatttttttcaatataagggaaggtttattatcttccacacttcaaaatttattagatagtctgcttcatagaatatatttatttaaaacgaatgaagaaatagcaccctagccctgcaagaaaacacagctgtgagaacttccatccctgactaagggtggggagagcatcatgatttgaatagatcctgacataagagaaaagctgactttatatttcaaaattaagaaaggaagagaacatgatacaggttttgtagctcttttccaaacaaaaattagattgcatggatctgaggtacgatattttgtgcgtaacttaagaattttattgggggagggagaaagggatatgaaaagtcttaacttatactggtatatctgctcaccattgtgaaagtaataaaattttatggaataaggtttaaaaggcagctaaaaagataaacgtttcagatcgcatctcacccctgggttctggggaaagtaaaggaggcagctagatgctgttctgacaataagattcccacccctgcactcactttagacttgcttctcccagctttcttaatctcagcatctttgagagtttccacatctgtggcaatgcatgtctacacacagggaccaaggtccttctcactggtgaaaacatggcagaggtggcagctaggaggggtgagtctgtagcaacctttgcaatgaatttactcgactcaactgaagaagggatctcagcatgaagctgatgctacgctaagaaggtctatatctacggaagctgctgcgtgtaggctgacaaggctggagggtgcgttttctgcaggagagctgctcaggtttgaggagtgcctgcacaccggcatgtgaattgtgtactctctttttttttttttttttttttttttgagatggagtttggctctttcgcccaggctggagtgcagtggcgcgatctcagctcactgcaatctccgccttccggtttcaagcgattcttctgcctcagcctcccgagtagctggggttacagccgtccgccaccacgcccggctagtgaattgtgtactctcacaagcaccatgttgcagatggtgattacagaccctacaggcagctgtggttgaaaagaacacggaaaagctcgctgtccctcttctctccagcacatgcattcctagtagaccttgcctgacatccacggccatccattgcagagcttgaacagtctgaccttgcaccgtcctccagcgtggtctgcctgtctctgtgtcccggcatgtctcagataggccacagtgcttgaaatccttctcagaagaatcctccttttctcaccagtcttaaagtgattctgagatatcttattgtggtcttattctttattggattgttacctctcaagcattcattcagcaaacaattaacgtatgagttgttaaacagtccttccttagagtagctcagggtcaagggtggggtgcagtggcataattacatataaataaaagtatacataacaaaaactatgacccttttaaaaaaaattctgtgagaattgagttatttccctttttttttttaaacccacagaactacaggaacaggaatgactgccaaagtgttgtttctgcacagatacaccaattctgtcccagggtctccttgctggcacatgggcaggctcatttactggtaaatgatttacttgtgtaaatctcttcccaggctcagcaggagttgatgaagcagctctccatccttcctcgtgacaactatagtctcctgagctacatctgcaggtgagaggcccctggtatcaactctgcagttttcaaccccatcagaaagaagctcctagttagaagaggagggaccacgtctgtgaacagagagattctggtctagcactttggaagatcagctgtattcacatagcactgaagtagcttcctgtataatttcaaggattctgaaaacctggttgaaccaaaaaatgaacgtgctcccccatttaggcctgcctcagcactgcccagagtcctggtacatgcaagagaacccagaatccttataatgtttctagaatgatctcccatctttgtgattctgagccgtagcttagctccagggagacattcattctgggccaccctggttattttccttcagccctttctggggacctgctgtgcgccacccctgtggcaactctagctgtggattgacccagatctggctcggctgggaactgggatcttcatcccagactgacctgaattttgtcttttattttttaaaaataatttgttgtagttcctagattataaaagtcatgcttgcttgacttggaaaccaggaagatatagcaaacagtaaatgagaaataaaaaggacccacaatcccttcaccagcaacaagcactattaacactttggcatttttccttctgggtgttttctctctgtgataaatctttacataccttaatgtaaatataggggaataatattttatactaaatcaaaattatataaaggattgtgtccttttttttggtttaatgttttattatgagcatttccctatgtcataaaattggattataaataacttcataatatttcataatgtttcatcatttggacacgtcaccaatatttaataattgctctgtatttgaaattgtgttgcttcattctatccatttttaaatggttctttgagagagtatttagaaattccctgtttttacagtgaatctgagagctttgtgcctcaaaggggtagaattttaacaaaaattcagtattagttatggagaacctgctgagaattagcaatgcttgtgctctaatcagaggatgagagcaaggaggcaccatggattccccaggcctgagatcttcttaccaataaagttttcctctctggagacttgggtgggatgagtgctgagagctgggagataagcctatcaaggcagacatgggtatgggcagatacccattttaccttttctagtccagtctgagctcctggaagtggatcttgcctcctgcttatgtgattccattcacctccccatcccccaccccagcagctgggcaggaccctcctgatttctcttccttccttggtcttgggtctttcaggatgaggctaaattcttgtgggcagagcaggctggtctcattcctgagtctgggaggaaagcattggatccatccctgagttctcattggaaccctgtagtgcttcctcctggctacttcctgctttctaccatgggatttcttggctgtctgtaggttcctacatgaaatacagctgaactgtgctgttaacaagatgagtgtggacaacctggctactgtgattggtgtgaatctcatcaggtcgaaggtcgaagaccctgccgtgatcatgagaggtatggctggtcccgtagtgaaagcaggtacccaggaaataacaattacaacattccccctgatatttgtgcactgctctgtagtttcccaagcattttaagctggttatcaatctcatctgaatcatgcaatagccttgtgaggtaggcagggcaggaattgtgtccatttttcagatcacaacaaaggacagaggtcaagggtttgcccaatggtcccacagtgcagtagactagtacaataatagctagctagtgtttgtcagtcttttattacttttaaatacccttagccagattgagcaagcaggtttcattttattttattttatttttatttaggtatttattgagttggagcctcactctgttgcctaggctggagtgcagtggtgcaaacttagctcactgtaatctctgcctccagggttcaagtgattctcctgcctcagcctcccaagtagctgggactacaggcataaacccccacacccagataatttttgtaattttagtagagacagggttttaccatgttggccaggctggtctcgaactcctgacctcaagtgatcttcccacctcggcctcccaaagtgctgggattacaggcgtgagccgctgtgcccagccagctttcattttacaagccagcccacaaaaaggctgcttaaaaagctgtgctgtgcaggcttctgaggctgtgtcctgacacagagtactgatatctgccatgggcatgggggcagaaagcctggcacatatttgctctgtgtctgataagaaaccagatatcatattgaggaccacatcaggagagaaagatatcttcattttctctgctgttttattgcctactttcctgatcaaaaactaatccagtggactattggctccctctgaaacagctccctcttttattctactcccgtgtccttctgttccatccctttcaacataatctccaactccaagcaattaaaaagggtcttttgagaagcaaaatgaggcccttctgggccctatagttttagaaccgagtttggagacatccacgggtggggatccttgaggactgactacctgcctcctacactacacaacagatctttttcttctgtctttcagggactcctcagatccaaagagtgatgactatgatgatcagagaccatgaagtcctcttccccaagtccaaggatatacccctgtcaccccctgcccagaaaaatgaccccaagaaagctccagtggcccgaagctctgtaggctgggatgccactgaagacctccgaatttctaggacagacagcttcagtagcatggtaaggtgcagagaaccttcctgcttccattgggttcttcctttagtccaggccatcccatgtaaggcctgctctcgggtggcaatttggggagttttaggtgatgcagtggcagtgggcgctgctgctacagactcatctgaacacaccttgaaagcctggcctctttccaaatctagtttctattggcatctttgaggggggtgagtgacaagtgtgccaatcacccagtgactgagcaatgaggtcctcactgaagcccactctgaaagagagactcaaatacagtccagagaagttcagtgggaaaaatgtatacaacattgtaaatgttttggtcagaattgttgaaaattctgggtgaacgtccagagaaaactggtttcctgctaacccatgaaacgtgattcctttctcagagtatgtgatgtgtttgtgtaatatttctcattcctcgataagccgtctcagccatgtcagcccccacatttgtgctgaagggttgaaactcacgttcccaatgtccaaaagctctgctgactctgaaatgtagacctcgtgaggacaataatttacaaaggtcaaatatttttatatatttataggaacaaatatttttacaaagaacatgtgaactttatatagtagcttgatctttatgtgtggccaaaaaatggatttcaaatttctagttgaccagatgattcaagttacctacagtactgttagccctgaagattgtttttaaaaggcaggtagtgggtagtggttgtagtttttcttaggataggtctttctgaaggcaatgcattctactaacactctaaaactaaaataaaatttaaaaatgctcatacttcatgtaacaagatcatcccacagtccttgagaatagctattattttactcatttaataggtttctgccatttactgatttctgtgggcaggcactatgctgggaaatttacactgatcacctctagagtcctcatattacataacattgtagggcagaatttatcattcgtattgtgttattgaggagcagaaactcagagaggttgagcagctggcccaatgtagtagcactagcttgttatagaggaggactcagatccagtcctcccttcagaacccaggtacctctaactccgggtggggtttctgaagcaagcaattggctgcaaaggttaaagggagggctcgaacctgattgtctgattttatgtttaggtctcacttgatcttagccaaaaggccgagaagtgattgattttgtgtttaggtctcatattctctctcctttttctttataatttcattaaaaaatatataatatatgcacatggttcaagtaatcaaaaagatagaaaaaggtatacgttgagaagttctgctccctcccgtatccccacccaccccatccctcactgccttagtttcttatttatccttccaatgttcctttatgaaaatataagaagacatgagtgtaaattatttacctccttttttacacaaaatgtagtataattctctctctctctacagtcacacacatacacatacagtcacacacaaactcccacacaaaactatgtatcttgcatttttgtacttagcagtatattctggagactttttcatgtcaatacataaacagctacctcatatgacctcatgttttctagaggtgtatagtgtcccattctgtagatgtaccagtccctatagatgaacacactgccttcagttcttttctttttctttcttttttttttttttttttttttgtgacagggtctcactttattgcttaagctggagtgcggtggtgcgatcacagcttactgcagccttgacctcctgctgaggcaatccttcggcctcggcctcccaagtagctgggactacaggtgcatactaccatgctgggctaaattgttttgcgtattttttgtagagacaaggtttcaacatgttgcccagcctggccttgaactcctgagctcaagtgatccaccctcctcagcctcccaaagtgctgggattacaggcatcagccgctgcacccagcctttcagttcttcatactacaaaagaagctgcaataaataactctgggacctccttttgtactcaggcagatgtatttctcaaatgcattttcagaagtgggcttgatgggtcagagggtaaatagatttgattgtatgattttgagacaaattattggagtttgtgtcattttacacttccagaagcaatgcatgaaagaactgttttcctacagtttcaccaacagagtttgttgtcaaattttgggggtttgctcatctgataagtgagaactggcatttcagtaattttaattttaatttgagtttcttgtattatgagagaggctgaacatcttttcctatgtacaaggactagtttcattttttcctctgtgagctgcctgatcttgtcctttgcccataattacattggttgttgatctctttcttcacaatttttatgaactttatctattaaggagagtaaccaattgtctgatatgcattgcaaatactttttgctagttttttttttttttttttttttggtttggcatgtggtgatttgttcttttgtttttatttttgttctttttaattttttaggtcatggaaatcaaaaggtcaaatttatcaaacttttacggcttctgggttttcagtcatagttataaagaccacccattctaagattacataaggatcctactttaggactctttaaccacaaacaaacacttgattttggtgagacttcatctctagaacatggttcctttactgcaatatccttttggaaaaaaatgctaatgcagataatcaagtaatgtgatacattaagaatttcataggtatgctaccaggaaacttttgttttggggtctctaatccataccttgggagcatgacacacagaggtgaaaaccccatgtgacatccatggccatttcttttctagacaagcgactctgatacaaccagccccaccggacagcagccgagcgatgcgtttccggaggacagcagcaaagtacccagggaaaagccaggagactggaaaatgcaatctcgtaaaaggactcaaacactccctaaccggaaatgtttcttgacatcagcttttcagggtgccaacagcagcaaaatggagatctttaaaaatgaattctggtcgccttcctcagaggctaaggcaggggaagggcacaggagaacgatgtctcaagacttgcgccaactttctgactcccaacggacttccacctacgataacgtcccttccctgccagggtcccctggggaggaagccagtgcactctcttcccaagcctgtgactccaagggagatactcttgccagtccaaactctgaaactgggcctggaaaaaagaactctggagaagaggaaattgattctttgcagaggatggtccaagagctacgaaaggaaatagaaacacagaagcaaatgtatgaggaacagattaaaaagtaagtcagacagaggggcactgagaggcacttggcttccatctttagagacaagagggattgttcccatccgccagagaagtcacatcataaagcttcaatttggggaagacagtaatctatagcaggcctagaaagaaaagagtaaagggaacaatgagatagctaaattggtgaacactctaaactttaaactagatttaggaaatgtaaatatctagcttaagtagtttaatcaataatttccaaacagtggttcaagaatcaacatgctttaattaatttaaaggaaattaattttttttatgttaaggtcattcattgattctgcaaatattcctcgagcccctcctctgtgccaggcacattccagttgttagggtatagcactgaacaaaagagacaaaagtccctgcacttacagaacttctagtggggacagatggacaatacaaatatataataaaatatatgttatgtcagctgatggcaagtgctgtggagaaaaataaagtgggtcaggaggttggaaagttcaaggaatgggttccaatgtaaaataggggggtcagggaaggcctccgtgagaaggcagcaggtaagtaaaggcctgaaggagatgaggagcaagtcaggtgtgtagatgggagatgactatggccagtgccgagccatgagaaaagagcagtcccccatggtcccacccaggaagagtggaagctgcctggggccagggagagtgattagaggagatgagggtggagaagtacaggaggccaggacgcagtagggttttgtcagccactgcaaagcctgagtaagaagcttcggggtggtttcaacctggtttatgcttcattggctcactggcttcccattgagcaccggctgcagggggcaaacagaagcgggaggccagttaggcagctattgcctctgtcacatgcaaattcccaagatctgtgcacacaatttgttctcttgggtagatagagtattttcttgaaatatttttcacactactgattggctggcaaatttgttttcaggagagaaagccttgatccagctgttcccatatcagcactagtcatgaggcagtgaaatgtgaattcgtgggctcttagatttatggctacgtcttagtccatgcagactcaggtatctgaagggaagactactttgaaccctcattcattgttccacacagagagctgccatccagaagcaaaatgtagcttgtttgtctaagaacctgaaaccaatcatttgtagaattaaagacttctgtgacatcttggcagtgatcaaagcagtcccatagaaggcacacactgccctcacatatgagtatcttcaacagggtagaaaaagaactggctgccacagatgtgtcagagtcctctgaatccatcagttggggaagcctcccatcccaggctcctgagcccacacagattctaccttccactggaacccatggtcaggatctagcacagtgcctcacttggaatttcttccagaaccagaggggtacagagaacttggagaagaaaagtagatttgtaatgagagggtcagaaggaatggccgggcgtggtggctcacgcttgtaatcccagcactttgggaggccaaggtgggtgaatcacgaggtcaggagatcgagaccatcctggctaacacggtgaaaccatgtctctcctaaaaatataaaacattagccaggcatgatggtgggtgcctgtagtcccagctactcaggaggctgaggcaggagaatggtgtgaacctgggaggcggagcttgcagtgagccgagatcatgccactgcactccagcctgggcaacagagcgagactccgtctcaaaaaaaacaaaaggaaaaaaaaaagatggaatgagatcaatttagctttaagaagagataggtgggggtaagcaaagttctgaagatggattgttacccacagaataggccaaggcccttgaagatagaacccaagttttgggctcacatgggagctcaagtctcccttgtgcaaatgggcaggccatttggggagaagggaggcacactctacagaatgaaattctgaaacaaatttccagtcacacaatcggcatgtgtacactcattcctaagggttaattcagcacagcctggcagggggccacctggcactacattaggatttgggccagtaacgattaaaatcctagcaattcaggaatcccacagatttttcacctggcatgggattcagaagtgagggtgagactgccaggaccacagctccccaaagggcagttccctctgtttctccaaatcttggtccccaggagatccttaataagaaagggtgctgatctatgctctccattgacacaggatgaggaggcactcatgagcacagaggtgtgagaaatttgaaatatggatggggcttccaggactgatacaaggtgctgtgggagtgaatatatagatctgttagaactggtccctcctttcaaagactttgttatccggttgaagatacaaaacattaaacgacatgagaaaaaacacaatagatgtcacaagatggtgttaaatgacaaatgagggggctgggtgtggtggttcatgcctgtaatctcagcactttgggaggccaaggcaggcggatcacgaggtcaggagatcaagaccatcctggctaacatggtgaaaccctgtctctactaaaaatacaaaaaaaaagaaaaaattagctgggtatggtggcgggcatctgcagtcccagctactagggaggctgaggaaggagaatggtgtgaacctgggaggcggagcttgcagtgagccgagatcgcgtcactgcactccatccagcctgggcaacagagcgagactccatccaaaaaaaaatgacaaatgaggggctcagaagtactgtggggattcaggttttctgggacatcttcatgtgggaagagggacatagctgagaggttggataagggtcttgtgatttgaaaggaaaatgagcagcaggttgtgagcaagggggaaggaagagtctagaatgaatgccacattctttcattcttttctttccttccttgtagccttgagaaggaaaattatgacgtttgggctaaagtggtgaggctcaatgaagaactggagaaggaaaagaagaagtctgcagccctagagatcagcctccgcaacatggagcgctcccgggaggatgttgagaagaggaacaaggccttggaagaagaagtcaaggaatttgtcaaatccatgaaggaacccaagaccgaggcttaagggtcccaggagtactgcagggacagccccagagaggcccaactctggcccctttctcagtgctatctgatgacggggaaacaaaattattctctgagagggaaaggacatttgagggaaacatcaaatttccccataaataaatgaatggagtttgcaggaaggtgagggtgagcagagatgtgtgtggacatctctgaccatccatcgctgtattcaaatggattgttttattccattctggtctcaggcatgaccacgtccagtgaagacatttgaggcagcacatctcaggacccaggcaatagactggccccaactcaggctggactaaggtgtgattaattctttgttttttgtgtggaacagctcaccttgtcagacagcctcagggcatctctgagacacaggggcagaaaatgacattcatcttttgagtcctcatccatggagtgctgtgtttggggggctgcatctgctgaagcgagaaccccattctgccaccccaccaggatgcccattctccaggacttctccaacttactattagactaaaccagaacaagcaacaaactgtatttatgcaagcaaaattgatgagaaaattatattcaaataaagcaaaaattaaaaaaaaaaggctattgctaatccatacggcacctttgtgagaattagcaaaagacactccttccttggggcaggtggcttgctgagcagggcatgggctgaatttcagtcctgacttgcctttcagggacaggtgtttctatacttgcggagcccccatttcttctgtatttcacacaattgctgtgggaattacatgagaagaggtaatctagtccctacttgctttttaattgtgtatggagggcctgggaacaaacgcttcctactatgataggatttgttgtggttttagacagtaattttcatgataatagtttcttttttcctgtttcaccaaaatgcaagtgattttacccttaaagggacaacaggcactagatgataggtgggagaggggctttcccagtggacagctgattcttccccttctatgtcaagccagcttggcagaggccctggtcaggccccggacctctaggtaggttggttgagtctttttttgttgttatcattctaattggatggtctccaagctcttttgactgggtaactcatcaacagaaaatgtttgagcatacaccccccaatatatttatttatttataaattatatatatgtactactatagtactccataatgtatattataaaattcacagaacagtaactgaataatgatgagataaaaacaaagatcaatagatgttcccaagtgtgctttcagctccggagacccctgacccagttgcccaggaggtattacctgtaccaaatttatatctttcatcccactgctcccataaatgtgcttgaactcttgaagccccgtggcttaatcagtggtttggaatctatggttgctgcagtgagagtttagccttcccagcacatgggcctcctctgtcattcctttttctctctgtcttcttcactctggttagtcctcccttcctatggccaggacttattacccacagagtgaaagtacagacagtagcatcagcatttcttggtcctgctactcaggccctgctctaccaacgccagcccctttgaggaccagattgatggagaaggagggcgactcctacggcattcctatctaggcctgcttgcagaagattgaggggaaactcatctggaacattcgtaagaaaagcaataaaatattgggattcctgagttttaggtgtttttaaataacaggatagcaaacatggaaacacttattgaccacctgacttacgttggcgagtgcctgcatttctgccaggcacatatccttgtgttctcccacggattcctcacactgactctttgggggctaaaacagagttgaatatggaagtggctgctgtcacaatttccaaagaaaacatttgtctgaagatgcaaagaggaggctctcaagtctgttttgaggcccgtgtcattggcccttactgggtccgggagccagagctcgtgctgagtggaagtgccacgtttgaatcccaa

SEQ ID NO: 37 - DNA, 461280 bp, Homo sapiens
  source 1..461280: mol_type = genomic DNA
catagcagacctatttaaaaaacaaaccaacccaaacaaacatgaagcccccacgtagctgaaggagggctgctggttcctagacatagagataatttattcaaggacagtccctatcctccaggagttaacaattcagcactagacaccctgtgggacccagcctgacaagtgcaacgagtgagatgccagaattgagtcctgcggtcgaacagagggactacagggcaacgcactgggcgtgggaggtggagatggctctgggaaaggatccattcatttattctacatttatcaatcaccgtagcacacacagcacatagtaagtgctcaatatctgttattaaatgccagccactgtgctaggtgccaggatgcaacagcggacaagaaaattgcaggggcacttgccctcgtggggcttaccgtgtagcgaaggatgacaggcagtagactgtcatcttattatgtaaaattgtgctagatgcagagcaggaaaataacaggcggctgaaattctagtaatgatgtgagctccttcggctgaggggaaccgtgggcgggttctgagcaggagtggccgtgagggggacggaccgtagggggcgggaagactgcaggcaagagctggtaattttaagatgcaaataacatttttctgcctgactggaagaggagcgtttggtcgctcgggattctcccggagcagggggctgtattttgagtgtaaaatcggttgccccgcagtgcagggcaggcggtggtgaactgcagccctagtccccaggtttttcatgcttggcacatcgaggctcttcggcccccaggaccagcagactcgccatgcgtggctcggattcgggctggagcaggcgggcaaggtagcgggggcgggtgcacagcaacgctcacccctaggtttcggggtctgcaacgctgggagggcaagaggaggcggagtttgcgctgcggacctaggcgttggcgagggccacgcccccagccgcagaccctgcctccaggcccctttgattggatcaagaccgcggaagggccgggcgtcctcgggcggcctgagggtcgggcaggggagggtgcgctgattggcccggcggggattaagtcatcgctagcaggttcgagcggcccagacaccggcggggcggccgaggctgctgtgagagggcgctcgaggctgccgagagctagctagcgaaggaggcggggaggcggcgtctgcactcgctcgcccgctcgctcgcttcccggcgccgctgcgggtccgcgctgcgtttcctgctcgcgatccgctccgttgcccgcgcccggaacagcagcacctcggccgggtccgagctcggttcgggagtcttgcgcgccggcggacaccgcgcgcggagtgagccagcgccacacctgtggagccggcggccgtcgggggagccggccggggtcccgccgcgtgagtgctctgggcggcgggcggcccgggccccggcggaggcgcgccccccggctgggcgccgcgcgcaccatggggctcccagcgctcgagttcagcgactgctgcctcgatagtccgcacttccgagagacgctcaagtcgcacgaagcagagctggacaagaccaacaaattcatcaaggagctcatcaaggacgggaagtcactcataagcgcgctcaagagtgagtgtcccgagcccctcggggacgcggctccggggcgggaggaactgggaggtggcgcttagcccgggttgcccgcgcgtctgccgggtttctgctcccggtacactgggggacgggtgtcgacgcctccgaggcaggaaggatacgtaaagcgggcgaaccagcaaccatcagatgaagagagagacccgtcgctccgccttttgcgttcagggatggtcgggaggtgacccagcgcgggtggtgctctggggcagcgcgggtgggcgtgggcgtgcgcggcacgcaggtgtcccagcagtggggccagagtgccgagcgcgccgcagccagcgggcagatcccatcgtgtccacagctccagctcccttaggggcagagttgctcagccttgagtgcccaaccgtgagaatggagcgtgccctgccgagggggcgctgcctccccttgggaaaaggtgggttgtgactgcttcgctccctgtacgcagctccagcctagtcaggccgccgggttccctgggtggaatgcttggttagcttgcgattccttggagtattggcagccagtaatctctaaatctggaatcagtacgtgcgcaggttctgattcttgtgtttagcagaaggtgataggggtgggagtagagaatcagagtgttcctttactctaaactgtgggcgagggtttaaaaatagaatgtacatatcccaactctctccctctcctgctcccaagctctcctttttacctcttccgttatccttgtaaaggtctgagaaggaatatccataattctcagaaagaagttcaaacgtatttcaaagattcttggaccttttgtaaaaccatttttgcgttttttccttttggtacaaggggagagatgcaattttgcattctgcttcacttttgcagagccagagagtttctttttctggccaaataagcgtgctctagggatgagtgctttggattgtgagaacgtttttggtgccttttcagtctccccatttaaaaatagctcagtccatcttttagttttaagaatcaggaaccacatgaaggcagatagtggaattgtctctgactctgttactgtatctgtttctgtgatggatttcttagtaggtgatacctttcagctaagaaatcttgccttagcagagtagagtcgtagctgtgggaattgttcccaggcctctttaaagggcacttacaaaagtcaggtgcctgagatgtcattttgtcagcttgttgcttctaaaaatgaagagagagacaatggaatgccagggcagcccaaagtgccaatcttttgggatgaaatgaacacaggactgtgatgtgatgaggcttcttagaggcagattcttaggctgtgccttacctgaaacatatgaacagacccttcctttgtcaataatcaaggccattcttggtttaggggatgggggtccctggtttggagtaagttaggggcccacttacaggttgggcccaggaattttgattgaacctcaggctggctttagtgagttctctgcttcactcagcaaacttttggtgtgattgtggtgtactgggtactgcactgggcactaagggtgtaggagtgaatattttgctgctcctgtgcttacagaggtgtacttcattccaggcactgcttcacatataattatctcatgtgcttagattcattctgcaaatgagaaaacagagactgggggaagcattacctctgagtcacacagctctagcagcaggaccagagcttttgaatccacctggtttgagccagagatggagtccctgccagtgcagagctcttgacttctgccccatctcacttgcccggaatggaacctcttgcaccaagccctagaatttggacttgtgttttctattttggcattgaatctgaggagggtgcgtttgggtgactggcagttttcctaccactagtttttgggggcaagaattctttggtaggaagaaacattgcagtgatagagttgaagtgttatttaagctgtctaatggaatggatcagccctgtaatctggaggaaagactgatggggatctcggtgttctgttctctctacgtccagctctgctaatgtattctaccactactaactactacttgatcaggtcaggtgacctctaaaaatagagggtggagtcaaccattgtgtcctggatttcagacattccgatatcatgagatgcttgctgcgtggtatactactatattaatgtttgtgtattatttttcttcagtcatgtttattatatctataaacagaagtgttttcccagtacaacttaaacataaatacataattatataaacactgggtttagataatctatgttctcttatagctctaaacttttgtggctttattttatagccatattttattttattttacagttattttataactagtatttctagctctttggatttaacttggttttgagtgttaatcataggcaataaaactgtcctctagggattgccaaagttcaggtagatcattgttactattacttccactttatgaatgagatgctggcaatggagatgcaaattctttatagatctagatcccgtaaaggagaaacatgcagcaggtgcttgattaagtgaaaacattgccagttgttttttagactccgagccctgggtagcaaagaccagctaagattttgtattatcctctgaagttttggagttctttctccatcacgggctttgaaggctagagggacagatgagagtggctgaatatgtcttggctttgtaaagcagcagagtttcttttgggggtagcactgaatgattatcagtgattgtcttttcactgagtaatatagcattgaacagagaggccaaaaacctgttcttggtgtgattcagtaaggtaagtaagtggttcatcctctttgcctttcaaagcaagagtaaaaaggtcagcactgagttacatgctttaaagcctgtcacccttttgtacttgttagaattaaacgtgggcattttgcaatacataagcgcttcttgaatggcataaactctcaaaggatgttcgatgccaacctgctttgtttaggagtaattatgttactcagaaaatcctaatggaacaaatggatgtggagttgggtagcaaaatattttccccagatcctttgctttgcttcagtaccttgtgaataaagaaaatcaaaggcatttcctaattatttgtaaatggtagtaattgacattttgaatattactcatacaaacataaatgacagcaaattaaattcaaacaaatttttatagtttttatataacattggctgaaaaacatcccttcattttactccattctgtgttcttagttggactgaaaaaatttgcatccagtctgtagttctcaattcattgactttggcttaaaccctccttccctgcacttaaatcattaatggacttttttttttttttaagagcagttttagattcacagaaaaattgagtgggaagtgtagaaagttcccacatagcgcctcatacctgtcccttccagttgcccctatttctaacatcctgcattagcatagtacagttgttatagttgatgaaccaatatcaatataacattattaactaaagtccataatttacattagggctcactctttgtgttgtacattctgtggattttgacaaatgtataatgacatataaacaccatcatagtaacatacagaatactttcactaccctaaaaatcctatgtgctccacctattcatccctccctccccactaaccccgggcaaccactaatctttttactgtctctctagttttaccttttccagaatgtcatgtagttggaattaaacagtatgtggcctttgcagattggctttttttcacttagcaatgtgtactgaaggttctttcatgtcctcttatggctgggtagctcatttctttttattgctgaataatattctgttatctagatgtgccatagtttatcctttcatctattgaaggacattttggtcgtttccaagttttatcaattatgaatagagccgatataaacatttgcgtgcagtttatatgtggaaataagtttttaactcatttgggtaaataccaaggagtataattgttagattatatagtaatgtatatatatataaaataaaatagtacgtgtagttttttttaagaactgtcaaaccggctttcaaactgattatactgttttgcattctcaccagcaatgaatgagagttcctgttgctctacattctgctcagcacttggttttgtctgtgttttggattttgaccatcctactaggtgtgtagtggtatctcattttaaaaaatttagctatttccttatgacatatgatgtttggcatcttttcatattgctttcttgccatctgcatatcttctttggtgaggggtcttcagatcttttgcccatttttatttgggttatttctctttgtcgaggtttgtttgttgtaaaatatacataacacaacggttaccactttagtcatttttaagtatataatgcagtggttttcagcatgttcaccatgttgtataattactatctctttcgagaacattttcataatctcaaactggaactctgttcccattaaacaataactccccactttcccctcccccaaccctagtaacctctattctgctgtctgtatgaatttacctattctgtgtacttcttatgagtggaattatacaatatttgtcataaatatctggcttatttcacttagcaaaatattttcaaggttcatccatgttaatagcatgtgttaggatttcatttctcttcatggctaaatatcttattgttgagttttaattatcaacagctgtcattaggaaagactattctttctcttttaaagtcataaaaatgtatttttttctttccatttcgtttcccttcagtatgatcactaacacttggaattgacataccaattgatcatggttgtctctcacaagaacactatatttatatttattcctttcaaagcagttacttgcttcaggtcagcatgtttttgggggaatttttcataaaaggttaattgaattataatttacattccataaaattcaccttttaagattttattttttattgtttttattatttgtggagatgggggtctcactttgttgttgcccaggctggtctcgaactcctggtctcaggtgatcctcccgtcttggcctcccaaagtgctgcgattacaggcatgaaccacggctcctagccactcacttttcttaagtgtataattcagtggtttgtagttacagagttatgcaaccatcatcctagtcctgttttagaacatttttagcaccccgaaaagctttctcatgctcatttgcaggcactgcatttttgcctgaagcctcatacaaccactgatctactactttctgtctctatagatttctcttccctgaaaaattaagctaaatggaatcatataatatgtagtcttatgcatctggcttctttcactaagcatgctgtgtttgaggctcatcgtgttgtagcatgtatcagtagtttgttcctttttattgctagaaaatattccattttgtaaaccataagttgtttatccattcaccagctgatgatttgggtcatttccagttttttgctcttatgaataatgctgctatgaatgtttgcatacgtgtcttcatgtgtatatatgttttcacttctaatttcattttttacctaggagtagaattttgctgggttgtatggtaaatttatgtttaagtttaatttaaacttgtgtttatttaaaaaaacctaccatactgttttccataacagaagcaccgtttcacattcccaccaacaatgtatgaggattctgatttctccacatcctcgccaatacttgttgttgtctttctttttgattgtagccactctagtgggtgtgaagtggtatctcgttgtggttttaatttgcattatcctggtgaccaatgaggatgagcaccttttcatgtgtttgttggccattggtgcgtcatctttgctgaaatgtctattcagatcttttttttcctttactttgtctcataaaacttttgatgattaagtgaacagcacttagtatattttctccatttgccctcttttggggactatttgtttccatgtgcttcaaccttagatgtatttaactgatcagtttcaggatctcaggaattaggaagtggttcttatgaggctgtggttcagatttctgctcttgttaggccagtgggcatcgctctgggcagatgccacacaggctggacttcctaattctggcctgcataagctaatgatccaagccctctcaatggacaaaatgagaaccggccaaggaagaactgttatcaccattgagctactggggaaagcaagttgtaaaggggactttgttatcctgtcaaggtcattgcatttctaaaaattagccagtggaggaatactaacctagcagtcaaagtagtttttctagatttaagtttctgagtgagcctcgttttaccttttaaaattataaccccttctgtttcaaattatatattttttgccatcagaagaagagtttcgttcaggaaatacggagaccctgctctgcctttaccatgtcctccagagccctagactagagtaatggctttttggatggaggtaaccaatgtaggagtcattagcggggagattgagtgggatgtttgggggccagtggcgcggccagttgtgactgtagcagagtgaaggcgaatgcacaaagagataggccagggcaaggtcatagggatcttgaattctagaaaggacttagagttttattctaagtgtgatgggcagccatggaaggctgtgccatgatcgtactcatactttaaaaagattatgtaggcagctgtgtagagaccaagcgtagtggagcaacaatggaggcaagatgaccagtaaggaagctgttgtaatagttgaggtgagagatgatggcaccgtgggctagggtgacagcatcacagatggtggtcagaggctgggtatttttggaagtagagcccacaggatttgctgcacagcatatgggctatgagagaaaagaaagaagtctagaatgattcagatatttttggcctgagcagttatgtgaatgatggtactatttgctaaaatagtttgcttgggaaggattaggtttaggggtaaaattaacaatatgaatgaatgacctaatcttataatgcaaagacaaaatattatgacatggatagttcctgaatacattctcatgcaagcatcaaagagtatagacgtatacagtgtaaaagcacccccttttcctagctaacaatcattgttagcagtttggtatgcattttttcttgtcctttttctgcgtgtttttttcataaatgggattatactataaggattattttgtgttttgcttttcgagttgatcatttgtcttgaagaccttccatgtcagtacatgcatgtagtgcattctttttaatgactgcagagagctttatgtggatatgccatagttggtatttactcagtttcctgttgaaggatatttggattgtctctgttgttcactattagaaggcgtgctgcagtgattatttgcacacctgcttttgtgtgtggattccagcatttccctgagatggattccttcaagtggaatggttgctggctccagtttttacaagccctttgacatctgttgtttaggtcctttgcatccttgtagccggttgataatttggtgctcctttgagtatgttagattgtttctgaagcttaatcttttggttaaatcagaagcatccttaacagacccttctgttagacactgacactgattttaaaacaaccaagggatagaaaaaaaaaaaaaacttagtgtgtgtgtatgtgtgccagggaaagagagatgacaattaattggatgtgtccctattagccctggaactgcttgatatgctttctgagtggcatgttcttataggtcagatgggagatgggatggggctttgcccatatctaagagtctattctaacctccaggctcagggactaggaaggaaatcatgtttatttagggtgagaacaacagcattagcagccagaggaatttttacaaattatagtgactggggtttacacatttttgtagcacctcagaatggagagagaggaaatggtaaggaaaacagcttggcagtgtgggccacgagctgtcatggcatgtttgtgtctggctcatttcaccttgattggaaggcacagaatgctgccctgggtaagctggagactgggcagtttcctgctatatttagaaagaggagattcctggggttagggtggtgtgtgtgtgtgtgtgtgtgttttctttgccagatagacaaaggtttgaggggtttgtgaattccacaccaaactgttaactagctggtttctctgggccaagccagtagctactctttgactcttgctgctgccacacagcaaaagctcaaaaaactcctattttatatggtttgaaaagataccgctggtaagtttcaaaactcatctgatcttgctgtcacatctgcttttaagtttactgcaggctaatttgaacactttgaaaatatgaactgcctcctcctctgagacttcagatagatctccaagctgactgagttgaactttggctgtttctgtgccaaggagactgtcaaacagataggaccaaagccttagcaaattcctgactgcgtatctcgttatcacacttgtgggtcaggggtagacaatgaatattagtcgaacaaataaaataaggcatttttactttaactcatagctatgtttctttttaaaagggttgcctaaataggtaatacctataagttgttcataattcaaaagagacaaaagagaatgtgaatatccctccaatgcttcctgtctcctgatccccacttcttcctctggaggcattttattggtttctttggtatttttcagatgtaatttatgcatgtgccaacaaatacacatacacattgtgccatatgtgctgttttaccctttgcttttaatatattagatattattctacattggtacatagagagctcactcattgttagattgcattgtattctattgtatgaattaaatatagtgtatgtaaccattcccctaataataaacatttagattatttccaacctttcaccattgcaagtaatgttgttgtgaacatcctggcacctctggcatgaggcacatgagtgacaaattcctagaaatgaaactgctggaccaaagggtatgtacatttttcattttaataagtatttcataacagtgtttctgaaaagttctaagtgaactgaatttgataaaccatgattttagagtaggaaggaaactcaccattttagacagtttattacagaatggtctctgtaaataaaacaatacttagaattttctccattttcccctttccagtttgtgtgtattgttaattctgggattaaaagccacagcaaaaatcattccctaaactgagacagctgtacctagaaatcagttgaatgtaggatcccagagaccttgtttgtgttcctagtgatggtgctgttgagtttttatctttgtgcggtgcgtgtaacattcaggagattcggcaggtttgttgaaggagggcagtcttctgccttctgtgaccggagaccgtgactctggtctaggggacacgttgcctatcatagaagcttcccggtgggcactggaattcctgggagctggtgagggagtcgggagttttgcatgacatctctctctggcagcttctcctgcagagcttagcacttttccctgatagaggacaggatcatgccacatgtcctctgccatctctgttccagctcctgttgatgtagaaggctacattggccaggttcctggcatgaagcaggcacagtccttgtctcctagatgctcactgttttgagaggaggcagggaaacaggcagcccacagcacaaaggggagattgctagcagtttaaaagggcctctgggggagggagcagaggcctgtgggaaaggcaactgaaggcttatcgagcccaagggggcagtgtggtcactaatgatcagtcatgtgaagggtacctctgttatttttgccccacctcaccaccctttatttactttgaaaaaagtctactcattacaaaatacatttatttcaaaaaggagcttttgaacctgcattcagaaattgcaagtttgatatggttaactttttttttctaaatatcttcaaataattattaaatcataatcattacattgaaaagtatttgtcattgtattgcctaaaataatcccatatttcaccagtgttatgagagtcattctcttcttaacactgtcccaaggcagaagtatgtgagagaatggacaccatctgcccatcacacctgggggaaaagggaggggagcaatgcactccttaggcttgggtgcaggtgtctggggcaggaggctgtgtgccagggaatacagtctgctgaaaatctgttttactcagtgggatcacaatttgaatattcaaataaacactgataagttatagagtggaatgcagaattcatggcttttttttgagatggagtctctctctgttgcccaggctggagtgcagtggtattatcttggctcactgcaacctccgcctcccgggttcaagtgattctcctgcctcagcctcctgagtagctgggactacaggtgcgtgccaccatgcccggctaattttttgtatttttttttagtagagatggggtttcaccgtgttactcaggatggtctcaatctcctgacttcgtgatctgcccgccttggcctcccagagtgctgggattacaggcatgagccactgcgcctggccgattcatggtgtttttgagagtagatgatcaggtgtggatgaagagaacacatagtcagcagcatagtgcctgaggaagggatgacagaggagttaggggcatctccagagtttccttcttaggccttgggaggatggctgaactgcatacaggagaggaatcgtggtgtgtgatgggggatacagagtgaagtaaggtttgtccttgctgagttcctgcagggcatgcaggtggagacacccacaaggctgtgggaagcacaagtctggaactctggaggaagatgagggctacaggtataggtttggctctctccaggtggtatttgaggccctgggagtgactgaatctataagagtgagacccacgcaggggtccttagcctctgctgtccattgaaatcacctgaggagctcaggactcaccttcagagattctgatataatttggctgggttgcagtctgggcatgggacattttaaaaactccccaggtgattctaatgtgcagcaagggtgaagaacgcctggcatggagtgagagaagagagtggaagctgaaaccatagggagcatccacatttagcaggtgggtagcagagagttggagaggctttgatgacttgatgtttcatcctggccagtttaggtgaggactgtttggaggcctttggatttgacctttggagatgaaactggagaaaacagcataagtgcaagggaggataataaatatctattataccttacaatattattgtgaggagcagctgagataattgtagatattatgcttagcagtgtaagcaggcctgtggtaagtgacctgttattggaatctgcctttagagtgtccttgtaagatagtggttcttaaaagtgaaggtgtacaagaattcccctaactgcagattctctggctttacccaaggaaatgctgatgcatgagctctaggcaggtctggaaacccgaatttcctatacccccgcccccactcccttccatctcaccccaagtgatttgcatggtgggagtccttggaccacacattaggtctaaataggtcagcagagattctgcataaatctggtccccaaatcctgttcttccttaatgtgcacagctgtgctctccagcctcgtgggcacatctcagatatctggagggtgtttgcattactgcaggcctaggaatgatgcaggagggtttcagaagcgtaaaagttctagcagcttgagaacatgtcagccagtgtggctccacgcctgggatccagttgttccgtgagcttggcctgtgagcgggaacccttcagcagcattgccagcggatgtgggggagctcctgaaaggaaacttttgctcctgggcaatcacagggaaactgtattcccacagtgagtcttgggtgctcttgtcagggttaaagtcatttggggtcagagcctgtaattatgtttcacattttttttttctttaaaaacattcaggaagcataatgagctggttgagctgttgcacagcaaggggaactcaggatctggggagaggaggagagagactgggtgatggctctggagctgagatgccttaaacccagagagagctgatctcccccttctacctggaggtgcccctgggcaactcatttctggcaaatactgctgtctctgttctgatctcagctggttctcacccttttaaagcagggctggatgactgggcagaccacagctgctgctggtgtgatcccagggtgtcaccaccaggaaattagtgctgctttcactctgctatttgcttcttaagaaaatctgtgggttgctcttccaaaaataaggttttcttgcatttgtatctgactagtgcactgaaatgtttgacacagactttaccgtgggcgacttacccagcagatcatcagccacaccacccctgctgtggacaatatgtcattgtggaggccagggcaggcactggaggcgagtgcctcagcatccgtaggcttcggcatccagatgctcctgctgcatctgtgtctgctggccaggacttgccacaatctgccggccttctgaccgaagctgcccagagctcagtgtgcaaggtcagcagactaccatgctgccagctctgtttagagcagcaagatgggtttctctctggaaagaaagcctgtttcctcttacgtagccagcatgcttgtaatcggttccccagcagggaagctctgctccattgcataggaaattggagtggaactgatagcttttggcctctgtgtcttttgggatataactttggcttgcttctcatctcccccacctctcctggccagcttaacttcataccatactgcaaggaaaagacacagcccagtggggcttgcttgggattttgtgcttgaaaccgtacgtaatttgtacatgaagatgatcaccagttgaagataacttaaattttgcttgttttcctaaggagtctaatccttactgcccctaaactgagtctctttaagaaagacaatttgttttttgatggttaagcaagaaacttgtaaaatgtcaaactggagaaggatgactcatatctcttaatgtgccgtctcaatcagccatattactgagctccccaaatgggcagcatgggggtaggcgatggtaggcagagaccatggacgatgttttttaaaaacagcttttttgagatacaattcacacgacacaatttacccatttgcagcatacaattcaatggcttttagtatatgcacaggattttgcattcatcttcacgattaatattagcatattttcatcattcccccaaagcaatcctgtagtccttagctaatatctgccattctttccatccctacctctcatccctaggcaaccacttccttaggatttttttttttttttttttttgagatggagtcttgctctgttgtccaggctggagtgcagtggcgcgatctcggctcactgcaagctccgcctccctcctgagttcatgccattctcttgcctcagcctcccaagtagctgggtctacaggcgcccaccaccatgcccggctaattttttgtatttttagtagagacagggtttcactgtgttagccaggatggtgtcgatctcctgatctcgtgatccgcccacctcggcctcccaaagtgccgggattccttaggatttttaactcatgtctccaagtgtggcactctcctatctgcttcgtctcttgatcttgtgaagccacatacccttttccttcagtgcatccaaacaatttgcagctcctcagaatgctgcagttccaacaccaggatgttccgacctggcactgttcttgctcttcacacattcttgtcctctgacagatttactagtgcaacctgactaatgcacactcactgccgagggggcctttaggcctctggtttcacacttcttttgtcttgtctgtcccttggtgttgatcttgctttagagagagtaattggaacgagagcgtgttatttctgcttgagaatgggtaccccaaatccagtaggtagatgcattccttcatttctacagaggaaaaaaattgccagtactatcctgatttggctggttgcacttcagggtttcagctttaaccattttagggactattgacaaaagtaaactttttatatgctgaaatggtgatgtttgggggtgtcagtggtcttaacaggaaagcccttcttcttcactagcaaccttgcattgttctaggaaattccagtccaaatgtagaaagcgtgttttctaccatctgtatgttttctctttctctcatttgctttcctcccttctttttctttcccttcacctttccccacacacccccatcatttgttcactgtgtctggccttctaccatctctctcttgccttgccaaaggaccagggaggtgactgatccctggtatttttttttttttttaaatagacagagtcttgtcttgtcacccagtgtggtagtacagtcatagctcactgtaccctcagacttctgggcacaagcaatcctcccacctcagcctcccaagtagccagaactactggcttttgccactatgcctggctaattaaaaaacatttttttttttttttgtagcgatgggggtctcagtgtgttgcccagctggtctagaactcctggcctcaagtgatcctcctgccttggcctcccaaagtgctgggattacaggtgtaagccatggtgtttggccctaatacattttttaaaaagttaatttctttaagagttggggtcttcctttatcacccaggctggaatgcagtggtgtgatcatagctcactgcagcctcggactcctggactcaagtgttcctcccacctcattttcctgagtagctgggactagaggagcatgctaccatgctcagctaagtttaaaaaagtgtttttagagataggatcttgctgtgttgctcaggctggtctcaaattcctggcctcaaatgatcttcccaccttagcctcctgagtagctgggattcatccctgatatctcagttatggagaaaacaaagcctttggtaaatggaaatgacgtgaaacagatttctggagttctagaatttttttttttttttttttttttttgagatggagtcttgctctatgcagtggcatgatcttggctcactgcaacctccgcctcccgggctgaagcaattctcctgcctcagcctcccgagtagctgggattataggcacatgctaccacagccggctaatttttgtatttttagtagagacggggtttcaccatgttggccaggctggtcttgaactcctgacctcgtgatctgcccgccttggcctcccaaagtgctgagattacaggcatgagccactgcgtccggcttggatttctataattatagctaaaatgactctcagctttgaggtgactaagacattctggttctagagaactcttagtcggactgtgagtggtctcatctaggtgaacagcactgtctagggctccctttcctgttatacttcctgtgttacatttcagagtgagaggatgtgctcagaaccagggtgggcacagaacttctggctcactgcttagccgttctgatgggtaacatttagtggcttattttctacctctctaatgggacctgatgacagtgtcaagtgtctcatttttatcattggggtgggagagtgccattaaaatggtctttaacaaagtaggtcaataatttatatttcaagaagggaaatttggggacatggaatgagagcatgttatttgggttagttgaacagctccagaaataattacgtatttttaatgcctattagggacctagaaacctatttggggaggtcaggaaactgggtatgagatctgagtctttgcaggtgctcgatctagaatctccagggagaatgtattttggacataaacaatgagacgtggataagatggatggcttacatctccctcccttggacagccaagcccacagctgacaaagccactgacaaagccagcaacaccaaaggagcaggctgacccttctgccttctcctgactttctgtctacataggttagtcattaaaaggaaaaaaagcaatccaaaaacctgtattttttcttagataacatgattatatagacaatacatgttcattagagaaaatttagaaattacagatggataaaataaaatgcaaattatgcctatagtactgattagagattgtcattttggttttatagtcttttcaacagttcatgatcatccctatgtatcattaactactctctaagatggtttttggtggctacataatactccaagtatattgtgtgaagactttttgaactggtgacctatttttggatggttaggttgtatctctctctcttttgtccatgattattaaccaattcttttttttttttttttaagatggagtcttactctattgcccaggctggagtacagtggcatgtggcatgatctcggctcactgcaacctctgccttccaggttgaagtgattctcgtgcctcagcctccccagtagctaggattacaggcacgtgccaccatgcccagcttatttttgtatttttagtagagatggggtttcaccatgttggccaggctggtctcggactcctgacctcaagtgatccacccaccttggcctcccaaagtgctgggattacaggcacgagacaccgcgcccggccaattaatcagttcttttaaaaccagctcccatttctctgcttgcttcccgactcccaccccatttttttgttgctggtttagcagaaccttggggacaaagagaagatacattaccagagtgtcacagaataacaaatttcatatgttgaaagcatgatttaaatttatttgaaccatactaatagtacagttgaccatctgtatctgtgggttcctcatctggggattcaaccaaccacagatcaagaatattgggttgggaaaagagcatcattactgaacatgttcagatgttttttccttgccattattcccttaacaatacagtacaacaactgttacagagctattaccttgtattaggtattataagtaatcttgagatgatttaaaatatgtgggaggatgtgcttaggttatatgcaaatactatgccatttcatatcagggacttgagcatccatagatattggtatctgttgggagtcctggaaccaatgccccacagatactaagggacaactgcagtagaatatctccaccatttaagtgttttctgtgagtcagatgcttttgttaagtgttttataaagtttatttcattgaaccttcacaacagtcttaatgaggtatgtactgctctattcatttatagactagcaacggaagcatagagagattaagtgtcttagacaactaaaaagtgctgttgtcagaatttgaaccttgatctaatgccaacccttttgcgtggaactattgttatactgctgactataaattgttagcccagcccttaaatcttctgttttctcatttacaaaatggagacacaagtgcttacttgggagcattggaagagttaaatggggtagcacgtgcaaagcagcagacacaaaaatgtagcagctattgctactctaatcactcattattttcaccttttgtgagatagtaatagtatagacatttaaacaaattgtctctctgctgtctctacatctgaatctctggcttgctcagtggagataaatcttcataattatctctggaaattagagtagaccttgtactctggccagtattatattgaatttaatccagatgtcttcgttttaatctatctagtcacaagattctgcaatcttttctggactgtttgggaggctgagttatcaaaaatcattataaaagcaacaacatcacatgagagcccctcccatcccaacccatctcactacccagaggtgattacttaagagtacttctttgagtctaatgtaagtatctgttgtagtacttaacaaaaagttgccttatttatataattgtttgtgttaaggactgatctccattcgctggtcatgaattatttccgttctcagcactagaagtttacatttccttgcacccccacccatacacactcctgccacttagcagactcgaacacttgggcggttctggggtaaacaacagcacaagacactccaaaacatatctagactgggttatgatgggatctaggacaagggaacccttctttccttatgtatccaggaccagggcactctttcttaatctctgctgtatttctgaagtcattttagttataacaacccacataagaagccgattgccctagaaaggaatctagaactggggactggtagaattttttttgaatacaaatcaagataaggtctttattaatccagtcaacaaatgtttattgtactctagctgtatggtaggcattgttgtagtgttgaggggttagctttgaacaagattaaattccagccttatggagcttttgtttttgtgggcagacaaacaagtaaacaagtgagcaggatgctagtggatagtgtaaagtaccatgatggaaatgagataacactgagtgatggatggtagagggtagaggcaactttagattatgtagtccgagaacacttctctgaggggctgaatgaccttccattctgggcctatagttggtgaccacagtgttgaaaattgtaaggcatccctttattaaaggaaagactctgctggatagtattttttcccatcgtatttctcctgtttttgtaggcagaatgatattcttactcattggaatcatgaccacctggaaccttagtgatcttggtaagatagaatccatttcttacatggcaggcagaccaatattttagaagtcataaaccttattccactctttctcatccagaatttcccagtggcttcccatgccattcgtcatacagttcggacaccttaccatggttcatgcggccttgtatgatcaggcgtctgcctaccttgcctaatgcctctctgaccttcctctttctacctcactgtgtttaagcttggctgacctcagattcctctgatgctctgagcactttcccgccaccttctcttactgttcctctggaatgcctttgctacaggtttttatgtcatcagcctttcatccttcaagtctcagccaaaggtcctctcagagagtcctcctctgaccacctgacctaaagtctcaggtagctgtcccatccttccccttctatctcattaccccgtttagtagtctttatggtacttctcaccctctaaactccccgctgcatgttgaataaatgatgtcgaatgttcctttaaagggcccttctcaaccacttgacttttttctagaagcaactctaagtgttgatggcctcaagcatcaagcatctcttggttctccttagggtttattttgctttaaagtttttttttttttttgagacagagtctcgctctgttgccaggctggagtgtagtggcacgatctcggcttactgcaacctccacctcccaggttcaagcgattctcctgcctcagccttttgtcttggataaaccaggtgtaactgctctgatagggtggcatctggcttcctttggggtagcccaagaaatgatgagttaaaagaagcaagaatcagaactaagtgtagattaatgctgtcaccagcctccatctcctctcccattcttttgccagtgtgctcattctgtttctctcttaggtctctattgctttacttttatcaggtaggggaaaggggagagaaattgaatgtttctaaatatctttcataagtagcactatgcaggaaggccaggtctgcttggctgggccagttgactttcggtgaattgatgtgtttcctaatcttcacacctagaagaaatggactgatggctgactcttaaattgacaaagccgtttgtttgtgtatatgaaactgctttaaaaagagagattttgaatattagagtatatattctcctccctacccctcgcatttaaaaggtgttaagttggctgggcatggtagctcatacctgtaatcccagcactttgggaggccaaggcgggtggatcacctgaggtcaggagtttgtaaccagcctgaccaacatggtgaaaccccgtctctactaaaaacacaaaaattagccaggcatggtggcacgcgcctgtagttccagctatctgggaggctgagggacgagaatcgcttgaacccgggaggcggaggttgcagtgagccgagatcacaacaagagcaaaacccgtctcaaaaaaaaaaaaaaaaaaaaaggtgttaagttttgacaaatcagtttagttatagtagcacaaatgggaaggtatactttataagcctcctaatcaattacaaaagagtcatttttcactttcctttaaaattaaaaagaagtttctctttgtccatatttcaggcctctcatacattgtttgctgacagcgtttctgtgttggaaccacatctcttgttcttccagtagataccctcagggcatagtttctgcacaaaatttatctgaaatctttagtgaccttttgcaggatttaatatcagttcatttggatagttccacatgcataaatgggccttaacaggaatttagcaaacaaaagatagtgcctcccatacaccttcttattttttaggcttgctaagtaaaatttaagcagaagagactgtctctgtctttctcttgggctccgtttctgtgttttttgtggaacactaccattcttaggtagagtgggtagggagagagaaggaacagcatcacctcttctctatttttgctcacacagatgccctgtttggcgacatctaagcactagagacttattgacccacattttttttcctccttctcctccagggtactgaccgtgcagggatctagtaccacagttacttctaaaatgtgttgccaaatgtagaaatctctatccccattgacttctcagttggaaattagttcatgacctagagactgagagcaccccggctgtgctttcagagcaggagtccttggatgtagctgtggaatgagcagcgttggaggatttgaaaaaatcctggacctgaaacgtaagctggcctgtgtttccctgatgtgccctatgccttttattgtgctgatttctactatcttaataaatagtaacattaaagttctttctgtgttcaaaaccttttccttgttttcctatcaaactgtttttgaaagcctatttcatctattttgagcaacactgataactgatgttcatcgaaggcagaaaggttggaggaactttggccagtgtggggcagacagaaacccatgggtattccccctaggcatcaggggctttgtcagctgcattctgccagctttgtagaacagcatgaatccactcctgccctcgagtagtgggaccgcaaacagtacatggtgcatgacctggaggcctgacattcgttcctctgcctgtccactggaatgaccaggctgaggctggtcgccaagcaaccctggacctaaaagaagcaggagaatttgcccactgattgttatatccctttgcttttttttttttttttttttttaatctatctttctttagaggcttgaggggtcgtagctttggtaggaggtgatgaagcatgctagtttgaaatactgatggtgagtcttagtgttttagtctcactggtcccagctctaatctgatcacttggtgttaaattaggaggccttaatgtctctctgagagccccagagagatggaatagatggggaaaagagagttgaaccccttcaggtctcagtatggacatggagtattggtgaggagctttgctgacagtgaaggcagtgctagttatcaccattctctcagttggttttatttatttattttttctttttctttttttcgagacagagtctcactctgtcacccaagctggagtgcagtggcatgatctcggctcactgcaacctccacctcccgagtttaagtgattcttgtgcctcagcttctcgagtagctgggattacagatgtgcgccaccatgcctagctaatttttgtattttaagtagatacggggtttctccatgttggccaggctggtcttgaactcctggcctcaagcgatctgcctgcttcgacctctcagtgttgggattacaggcatgagccaccatgcccagcctcagttggttttaataagttacatttgtagaggcggtgctttcttctggccacaccaaacggtattttccatggtgagggagagaagaaccaatccaagcggcttaaacagaaagggaatttgttgtggtacatctctggaaagcccagtgatgttctaactgaagacctgccagactctcgtgactccaaaggatatcagcaggccctggtctctgcatctctcaactccactcttctctaggctggcgccattctcaggcagtcttttccttcacattggtgggatgacttggccaagattttgaagggaagccctcagcatggttctcattggctctttgttgaagcctgtgctcatccttgagataatccctgaagccgacctgacccagccccagagtagagttgacagtgggtaaaataagtgttctgaaagtcagggagggatgatttcccagaggaatactggggtgctataaatacagaaggaggggggacagaggccaaggcaacgcagttactccacactggcataagtaaattgagcacggtcatctgtggaagagaaagggccctgccttccagatatagcatggttgttacccacatttgaaaattactttgggcgatcaggctgtggtttaataaagtaaccctggacattcaaatttgtagggggaaaaatgagatacttttagtattttagtattaggcaccaccaggattgggcagactgtgagcagcctaagaatagtgtttgggagttaagtgcctagagagtagggaacagggatgtcaggcagataggagggagagaggggactgcccctgttgggacagatgataagaaatgaaaacaaaatgatgtatgagaactattaagtaatgccacagagttctgtaataccccggccaatgattgactgccctgtagcccagccagtacgagagctagttctttatcttccagagtctctttctctttatgatatttacattttgggaaataaactataactaatagagcttgttgtgaatctgttgatgtctcgtataatggattagactacaaaggtgggcaagctttttctgtaaagggccagttagtaaattttttaggctttgtgcgccacatagtgtctctgtcatatcttcttcttctttttttttaaaaaaatttatagccctttaataatgtaaaaaccattcctaactcacaggtcatacaaacacaaggcaacagccacattttgcctacccccagaatgggttttggagtcagatagacctgggttccagtcctggttgttgcccattgactgtatgggcattttaatctctcagaaactcagttgcctcagttttctcatctgtaaagtgaggctgatgaaagtgaccacctcgtagggttattgtgaggattgctcagaaagtgttggctctttggaatgatattgttgactctttaccaccgcacagcatgctctagggaagaagaggccaagctctaatggtctttgtaatctcagttgttcttcctcttttggtgcctcctttttctctgttctgggcaactcttcatcaggttttgggaacttggtgccaatctcagtttcatttctggtgtgttcaggaagtgacccacattttaatccatatttgacagtaaccaaaataaattggcttggttcattatccaagtgtagaatatgtacttgttttgcttccagccccaaattccctccgtatccactttttcattacattacaatttatcgcctatcaaggcctcttattaaagccaggaggataattttttccagtttgaaaagagagaatgttagaattgtggagttttgtttgttgaacttggtagatggatgtcaccaggtttggaaaaggggctgaatttatccccagaatctcagccctattacctaccactttgtacaggtaagttatgatggaatggatagaaatcatgtgacctctcaaatccccaggatcctgaaagtatctgccctctttaagactttctcaaatgtcatctcagcaaattctaccctgacagcctcccccatcccacttctctgctctacttttttctatagtacttatcttgttttaacatgctgtataatttactttgtttactaaggtgtttttctgtgtgtgtgtgtgtgtgtgtgtgtgtgtgtgtgtgttacgtctctcctactagaatgaaaactccacaagggcaaagatgtttgccattgttcatttctgtataaccagtgcttaggatggcatctgctgtatggacaaatatttgtggaattaatgaatgaatgctttgattcttatattggaatgtttgctacatcctattctctctggccaaagaagacataagacttgggtttaaatattgactctgccacaaattgcctctgtctttgagcaaattatttaatctcttaggaccgtagttctcttatctttaaaataaggggttagagtaaatgattgctaaagttcctactagttctgtagttctgtgattataatcgctggttaaaagagatgatgtactgctattaaaattcccacatatatttcctaaaaacagtttgaatttcattggtgggcaaagtgaatcaagagtttcagaaaaaagtctttggaggcaccttctgctttcactaaaacagttctcaagtattacagtgtagttgctttcaagaacgtttctgctagcccttttaggataaagttcagacgtcttgatagggctttctgagccctgtggactctggcccctgccagctcctccagcctcacattgcctatgtgtataagctctctgctccagtcctgaatctgttttgattttttctaatggataatgggtttcccagcatcagtccactgaatatttctgttccttctgcctggtgtctctggtaccatccctgtcctcctttgtttggccagtgcctactggttgtttaggtctcaacacacagagggtgtggacttagggagggattgccaatggggttccgtttccactgggaagctcactagctatagcgtggtgtcagaaactgactagcctggttggctatatcatctgtgcaataagaatccaaaagttgttggaattagattgcagaaggtttaggtgacacagtgaagagtctttgttcagtggacactgggaagtcactgtaagttttttgagtagcatagtgacataatcaaagctttgtgaactaaatagcccggatatacctctaagagcattgtatcatttctctgatccctaaaacatcctttgggagataaatgctagggttcctgttttgtaaatggggaaaagctaggacacttaatgattaaaggactgattttcagcatcataggaaagcagttgattgagccagtgtttttataattagatagaattgtgatctgtgggattgatgaatgttgcaagtagttttgttcatttttcaagtgggcaacaagatgaatatttgagtgttgagaagctgtccctcaaaggtgactgactcaaggatttgtcaggaagctttggcagagacttggattctgcttaggagataagtgatgcttttgggggtggtcacagggtgattttttgtatcatagctgtctgtgctcaccctacgtggttgcttttgttgtgttgacttggcaagatcaaagaacaggtggatgctgatttccccttctggctagtttaggaattgagagttctctcacagcaaccctcgtctgtgattccattctatttaaaccttaaggcaggtatttcggttttgcagcttcattgacaaactgtttaaagctgagtttgaaaaggcaagtctttggtggtatgattgataatctccaaagaccagttgccactctgttgggggagtgcttttcaaactttaatgtgcatccagattgcctggggaccttgttaaaatgcaggttctgaggtggggcttgacattctgcatttcttacaagctccagttgatgttcatgctgctgagttgcctgtgctagaccaagtttccctttacctgacccttcttcttttccgctatgtcccagcctttctctttcttgatgtcttggacagtggtccccatttaggggctactagcatttgccaggtggactcattgattagcttgcggctaccactatagccagggtggtcttttcaaaatgaaaatctgatcacatatgccacttcagtgcttaaaaccctttagttgtctcccattgctcttaaaatgacccccttattgtggtctgtcttcctttgcctctccactctcatcttacaccatctctgcatcttccggcaacaggaccctttttctgctccctttgatgctcatgtgcctcctctatcacaaggctgtggtacatgcagtgccctctgatgcagcattcctccgcttcccttcacctcttcctccttttatgtctcagctcaaatgccactgcctctggaagccacctggtttcccagtctagtgaccttctgtcattggtaggcttctttggtgtatagctgggaccagcatcagagaaacaggcttggttggggcatggtgggatattgtgctctgactgtgctctcaaatggagtattgtgtagcattttaggaagttgtagattgcctaagagctgtctttcaaaagccactctgcctggaagggtggtgatggtgcaagtacactttgtggtatgtagcgagaagaggaagagcaaagagtttccgcccaggacctatcatgccatctaaagctgggtttgtgtctatgtatgcacttggtgaacagttatatatccctcccctcttccccatgcttctcctttttctactggtcttgtcattttataaatgcaggaactatataccctcagggaaggaattgactagttcagggctgtgggatatatggctgacctgagaaaagaatgcagctctcattgcagcatggagccccttcatccaccaggccaagctggtctggcatttgagtggtaaccttgaaggcccagtagctgcctggcagctttcctgggcatggaaacagccctgtttaggtgatgctgttccttcccaatctggtatacctcgaagagataatgtgttccacattaaacctaacagacatcgctaatttggtcaccttttctgcttttactcttactgtaagagtaaagtaatgctgcaggtattcactcttatagcggtgaatggtattaggagtaacaactgtggtgggttttttttttggaggcatattgtaatgtatctttattttctttagagatatgtgtttctgcattttggttctttcttacattcgttacaactcagactataagatccccttagatgctaagctccagaaggatagggttcatggctatatcctgagtagtttgcgtggtgcctggcacacagtagccattctacaaatgcttgtcaagacgaatgtcttaatttgtaatatggtgagaagtttaccctccatctttcaacagtcccaagagtggatgctttgaggctgagagtatttgtacctgtgaattcctcagcaggatttattccttgagctgtaggaatgacatgtaccttagttcgttttgtgctgctctaacagaataccacagattgggtaacttataaccaacagaaatttattggctcaaaattctggaggctgggaagtccaagattgagggcccagcatctggtgaggaggggtctgctttctgtgtcatcccatgttggaagggcaaagagaggatgagagaggcaaaagggagcaaacccatctgtttataaggaacccattcctgtgataataaactcactcccatgattacagcattgattcattcatgagggcggagcccccatggcctcatcacctcttaaaggtccccacctctttgtactgttagagtggcaactacatttcaaacatgagttttggaagggacattaaaactgtagcaaaatgtaattgacttcacagctgcttattcacatgcttgagtcactggcctgatgtagtgggacacacagtgttaaacgaacacttttgactcattggtacaaatttaagttggtaccttcttatccttgaatgcaggctctgagagagccatacttcccattgtctggcacaatgatctagaaagaaatacctgcgtaataagtaactataaaaaatccagactaagtttctaatgatgaataaaatttgcactacctgaaaggcttaaagattgagcctttaaaggggaactagggagggctctagagacatgcagcttattcgcttctgttctttagtgactcattggagtccttcctccccctctctctgtctctgtctgtctctgtctctctctctcaaactgccatcagaaggctgaggtctttttctttgtctttttttttttttttctgagatggagtttcactgttgtcacccaggatggagtgcaatagcgtgatctcggcttactgcaacctccgggttcaaacaattctcctgcctcagcctcccgagtagctgggattacaggcacctgccaccacgctcagctaatttttgtatttttagcagagtcggggtttcaccatgttggtcaggctggtctctaactcctgacctcaggtgatccacccactcagcctcccaaagtgctgggattacaggcgtgagccactgtgctcagcctcaaggtcttttatctaattccattatttgtgctttgttaatagacctgcttatggtgtcagttcagtagtttcccggctttccacaactattctcgtgaacctggcagcacgttctcttgtgctcacgtgtgatttgatccccatagctagaaggtgcctgcaaactggaaggtcttagaatcagggtgggaggaaagcggaggccgtggcagagagagatcaaaatgatgccaggttcattttttgttccagtctaagaaggtatctaaacctccacattgtatgactcctgttcctccctgatggggaacatcaggtcacagatggggctctgggcaagagtgtgtgtgtttgcctgtacaattcagtcatcagcttactgcaggtgccgtttcctgttcttgaggcatctttaactgcatgatggtggctatgtggttttagttggttggagcacaggtctgattgctttttctttctttttaacattttttctgggcatagctttgactctttcctctgggtttgagctgtggaattgctgtaggagctttttgcattgtgttttacacatctagttctccctcctgtcatcttgaagttcacatctgtgctattctagtgctgcactgtgggataataagagttatagtcatagcgaatagaaattgatgacgccctatgtgccagaccttaaaatcttgtatgtactgtcattcagtcatcagaactttataatgtatagtgtcactgttgtgccaccatctcttttttttttagatgaggaaagacatgagatccatgggaaagacactggatgcccctttttggtaaatacggacaaacataaaaaccccaatcatctttttgagaaaaagagtgggtaccttgtctgaatccctggcatattttcaaggctgcctgctaaggtgtaagatttagtagagggttttttttttttttaactgttaccaaggagatggattgccttccaaaggcaaatatgatgatgaagaattcccacccctcccccagcccccgcctttggctgctcttgtgttcaaagaatgtcactgtacccaactgttttccttgcaaggaatagggacgaaagtaccttgtcttaaacttttgtggttagagaagcccacagcccttagggaaacattgcatttttaaaaaatgactttaaatccgtgctgttgatacttatgtctaatgccagtcattggtctgggatctgtgtgcagagttgccttctgtctggtgagactggagtgggtgcgggtcagattccgtaacctcgtggagagaggataaaaactagattgaaagaagaacatcagaggggatctgttccctcttaaatccctggaagctccagaggccgtgagagttgagatgagagaaactattctgtggtaccttttatatgaatgaggtatttgtttacaacaatatccagataattttctttttacagtaatggctacaattttgccccatcctgttatcattggtgatgaaggctataaacagatgtgtggaagttgatgtttttcagatttcgttttcattttattctgagcattctttaacagagctgtacccagttagcaggatttaccttgtttaaagtttggtctccttttatttttctggtccttaattttagtggagaggtccatgcgaagtcaatttgctgagatctgccagtagatggaggaaagaaaaagtacagtaagtcctcacttaacattgtcggtaggttcttggaaactgtggctttaagtaaaatggattcttgaataatgtcattttgttcaacgtagtttttattgtaatgttgaggacaaaaaaattggttttgttatgtgttgttttacttaaagttgcagtttccaagaacctatcgacgatgttaagcggggattccatgtaattgtaatcgtcagttgaagtggctctggagtgtttttgggattgaagttttattgatgaaaaagtaggcattggcaaatttttttttttaacagctgtattgaaatacaatgcacatactagggcactggaaatttagaattagctcagggacactagagtagacagtagaccaagtctgggactctgatgagaggcccattgacattatttgtttgtttaaattaggaggcccaaacctgagttagatttcatcctctccaaacctcagtttcctcacctgtaaagtagagaaaataatacttgggcctaccccatagggctcattcaaggattcagtaagcctctagtccatattaagtgttttggggccatgcagggccaactgaagttccagtgtgtagtggcggggagataccccttaatccagcctcatgcgcagactgtcataaagtatgggaaccttatctttctggtctgcatagtttcttctggtgaaagaatggttaattgaactgaaagtacattgtgtcttgtgtttgggaaataaaatagtgatctgagatgccaattaaatctagtgttgccagataaaatatgggacacccagtaaaatttgaacttcagataaataatgaaaaattttcagaataaatatgtcccaatataattgtagtttaccttaaatttaactagttgttctgcatttttattggtgaagtctggcacctctaattttgtctcattgtttccccatttggaatcttttggctgcctttatgatagctgaaaatgagttgaggaatttcaaataggatgcagaggtatgattttatttgcatctgccccatagctcctgtcctttgttgttgctaatagaaacctggcctttcacgaaaggtcccgtcatctattaaaacactggttgcatagcagccaaacatttttgttgagaaataagccggacggaaatctctgtgatgacacttccttcaacctcacgctattgccgaacatgcgacaaggaggatgttgggaatggaatcataagaatcctcctgcagcacgtcagcagttcaccctggagcagttagaggtcagcaggcagggactctggtggcatctggggatgtgttcttgggctttaatagcaggtaggaagccttatctgtggaggagtccagcagtgaacatcccattctgcatgccaagggaacgcacaaataggcaacatacaaaaacaaaagaagtcaaaggcctggtccttgatcactgaggagtgtatagttccagagagggataggaccagcaggtatttacacaacacttcctttgtgactttgtatcagcactggtaggtgctttccacgcactgtcatagtaatccttaacagcagccctgtgaacaagatcctgttattattcccattttccacatgaggagactgaagcttaggctgtgggatggagcctgcagccgtaaagtcagcctgacctaaaagttcctgttctgtctctactccttatcaaatattgcaagtataggttgaatcatatgaaattgccagtatgtaacaattttgacctacaaaaaacgacagttttatatggttcaacttcatccaaagaacgagacccaatattatatacacacacatatatatattacaaataacttgctattccgtaactattacacataacttgccgaggctgactagggtgaatgaaatatgtggacctagttttggtctaaccagggatgcttctgggaagctagttttcattcattcactcacccactcactcattggctcactcactgaatggaaacttactgaattcttccaagcatattattaagcataggtttgaacagattttattttttatttttatttttttgagaccgagtctcactgtgttgcccaggctggagtgcaatggtgtgatctcggcccactgcaacctctgcctcctgggttcaagcaattctcgtgcctcagcctcccgagtagctgggaatacaggcatgtgccaccacacccagctaatttttgtatttttagtagagacggggtttcaccatgttgcctaggctggtctcaaactcctgacctcaggtgatccacctgccttggcttcccgaagttctgggattacaggcatgagccaccatgcccgggctgaacagatttttttttttaaactttttattcagaaaaatttccttcctgctcatttgtagtgaattctgctctcaccatcatgcaaccactaatctgtgttttgtatgtgggccatttctggccatcttgtatgaatggaatcattcaacgtatgattgtttgtgtcttgcttctttcacttagcataatgtttttcgggtccattcatgttgaagcatgtgtcacgagcttattcctttttattgctgaatagtagtccatcatgtggctataccacattttctttttctttttctttttttcctttcttttcttttttttttttttgagatggagtttcacccttttcgccaggctggagtgcagtggcgcaatctcggctcactgcaacctccgcctctcgggttcaagcagttctcctgcttcagcctcccaagtagctgggattacaagcatgtgccaccacacctggctaattttgtatttttggtagatgtgcggttttgccatgttggtcaggctgttctcgaagtcctgaccgcaggtgaaccacccgtctttgcctcccaaagtgctgggattacaggtgtgacccaccacgcctggcccacatttagtttttctattctccagttcatagacatttggatcatttttactttttggctattatgtatgttgctactatgaaatttttgtacaagtttttgtgtggatgtatcatttctcttgggtaggtaactaggagtggaattgctaggtcatgtggtaagtttgtattttacttttagcaggtttttgaggagggagagcgaaaaatgagtttatatgaaggcccaaaagtgtgactgaggtttggaatagctaatgaggcagctgtaacctggaatgaagtaccagaacccagaaagatgagctggacagattttagtaggaaggttaaaggtgctctggagttagccagtgatcctgctgcctctccttctctatgaagccagtgttcctttctttgcatatttggtagggtgggtaaaaggctcctctttctgttgctgattttggaccaggaatgtcattttttaaccttccagtggcaatagtccttaacccggaagtagcaatgctcccccttctagagcatcaattccctaatgtggaaatccagtcccacagttttctctgagaaaaatgtggacagtgtaatataatgggttattcataagcctaaatttatataatgcaaaggtgtgtgtcttattcttggagtgtatctttcttactgttttggaataatgaagactttttgttgttgttgtcggagacagagtcttgctgttttgcccaggctggaatgcaaggcacaaagacggctcactggagccttgaccttctgagctcaagtgatcctcctgcttcagcctcccaaggagctgggaccacgggcatgtgccaccaggcccatgtatttttttatttttattttttgtagaaacggaatctcactatgttgctcaggctggtcttgaacttttgggctcaagcaatcctcctgcctgggattacagtgctgggattacaggcctgagccattgtgctggccatgacaactttttaattcagtgatgttaatatatgttttttaacggttgtacatggcataataagttataggcaatgaaatgtgtgtgtgtgtgtgtgtgtgtgtgtgtgtgtgtttagtttaagttggttgttgaaattcccaaatctggggactacttctccaaagaaagttttgggaaggcattagttaacatctttgtattttgccttcttccgtattttcttacattattgtgtagtgtgggcatctagagtgatgcctggacgacatcacagtgaaagattagtgcaacgaagaaaagacaatcccagttatgtacccccccactacttagacatctaactctgtgttaatatatgcagttgatgggcacatgtcatcttaaatccttttggtagtacaaagaagccagaactaagtttagtttggatttcttacgcatatttggaactaaccagcagttgactcatttcaggataagcagttgttttctatggatattctgctgaggttggaggctctgcaccaactgtatgtggtgagggctttgatatagaacagcagcactggatccaaagtgtgaagggagccctcaggcttgctatactgtgcccgtcctcaaggttggggctagggagagggatttttctgtaacatgatcctacagtacacatagccacattctccagttaataatgacaaccgtgataatggttgaaattaatcacagtgaaattaaggcatgaaattaataacagtgaatgcattgagccaacatcatgctaaatgctttcaggcatgatgcaatttgatcctagcaacagttgtgttagacaggtatggttattccttttttgtgagaagcaacttaggggcagtagtgtttggtaaattgcacacttaccttgccactgactgaatgagagatgtagagcccattgccagaaggggccaagccagggttcaaacctaacctgttcttttaaaaccatgagcctctcagatcagcagtttctacaccagattgtattcccagaggcccagcgcttcagttcagctgtgctgctgaggtcttgtgtgtgaaaagggaactgggaatggattctgcaggccatgcttagcaaaacctccctgaggcagcccacggctctggtgtatccagcacactttattgctgcccctctgtctacagacggctctattgattcagccttgggaagtctttgccccctgccctcttcaccctttttgttgatacattcccagaatgttcaagttcacacccatgttgcaaccctggctcctaagcctgaggacaggatgtgagtgcctgccctggtgctcatgggtatcagcgggacagagatttgtgctgagctgcgtgctgctggcttcccccttgcctgtccttgggaactggggactttacccgctgtctttatgcagttcttacaggccatattttaatgctgtgtcatctcttagaaagatgggttgaaaaggataaactggaagcttctattcatttctcttttatttttaagaatgttgtattttggcagggtgtggtggctcacgcctgtaatcccagcactttgggaggccgaggcgggcggatcacgaggtcaggagatcgaaaccatcctggctaatacggtgaaaccccgtttctactaaaaatacaaaaaattagccaggcgtggtagtgggtgcctgtagtcccagctactcgggaggctgaggcgggagaatggcatgaacccgggaggcagagcttgcagcgagctgagatcacaccactgcactccagcctgggcaacagagtgagacattgtctcggaaaaaaaaaaaaaaaaaaaaaaaaaaaaaaaaaaaaaaaatgttgtattttaggagaacattgatccgaaaggtgatttgcatgtcttttctgcttgttaaactcagcatagtttgaggtggggaaatcccaatcatctaattggtgtcaaattttgtttagtagtaatttctgcattcccttttctttcctttcctcctctcctcttttttttttctcatcagtttaacatttgccatagtttatgcttagcaacctgtgagatacggctagtgtcactcacttttggtaacacggagtcaccaaggtacagaataactaagtggggtatgcagggtctggccagaaatacaatcttttgattgctagcccagctgctttccttgttatcactttgtggagcaggctggacattgacaatgagttctgagactgagtggaatgggagacccctcccagctggtggtcgagctgcctagagcatggtccatctgtttgggactagggttgagctccaagatggaccaatcaaccccaccaagaaagaaaccccttctatcaccgcggagtgtaccatagctcctgtcagccgctctggaagtttttgccaccagaagagagatgcagagcatcttttcttaccacagctgaactgagaacatatgtttcatccatatatggcaccttacttattaagcttgtgtccttgtcctttctaatactctggcaccttgcccatcagatggctgcccctttttataagataagtgcctgtatggctggctgttctgattttaagtcatgagctttgacttttatcagaaatttacagcttggttttcaaaggacttagttgagtgcaactgcatgaaatggtagtgttaaattttatactgtagaaatgttgaaatggaactctataaaatgtgcgttttcagtgtcttttttgaatggttttatttgtgtgttttatcagtcttagacatttttattactcaagtaatctgttcattgtagaatgattagaaaatacagataagcaaagagagagaggaaaagaaaagaaaaaaatataggtctactgtaaataaaagttccccaagagagaagccaggatgtgaaggactttgagcttcttagaagaaggggtcagatcagctggtgcaattctgcattcccagcagcactctgttcttcctgttttggacactagcaatcaagacagaagttggggtgtctgaatatgtcctggagaaagtcaagatggcttttggtttgctgccccaggcagtgagtcccggtggttcaggggccaaaagtcctgcagttaatccaccacctgcaagggatggctgtgaaaagagaaaaatagtcctcctttggagtcccattatttatacagttgctagctttcaagcagatagagagaaaataatcttacagtcatgctttccctcctcttaacttctgccagtcctgctggagccatccactccttcattcatctgtccatccatccatccatccaatcactcattcattcattcatccacttagtggctcacttcattcatccattcaataccaatttactgtgtacctgctgagcactaaacactgttgcatttggttctgggaatacagcatgaataagataaggcccttctctcatggatcttacattggactggtgcaggttttagtatcattgcttccctttcagccttacctttctacagctgtggataagatgccatgaatttgcgagtaaaagtgtttatctctccctggagcagactagacccctaggctctgtcctagagcacaactcacccttagctgccctgcaacctgatcatctccaacagggaaggtgaagagaaggcagtatttggctgatgaattcttctcaaaatgatactttagttttgtctgggaggggcaggggaacagatcacagagggaggggttcttggctttatcagagaaagaaggcctcattgtgtgttgttgttggaacaggtcccagagacctcagtacaattctttggacagggctgagctaagctaccatgtatacaataatagtcgaaagaatagtgtggaatttagggtagtatcaaagagagctctgtgttacagctgtcttcaggcagagggcatgacttcagccccaggtcaagtcctgttgttaacttcataatattttaatgaacatgcctttttgtgtctgttcctctcccctctcccccatctctttcttttttgtgtgtgtagtcatttattaagggattttgatagaaaatttaaaacttaatctctgtaaactcttccttttgaactatggcatacctgagtggacaggcaagttgcagggatggggacatttgacacagagaacttaggaagttccaggaaaccagtatttctgaaactgtagtcaattctgttttgattttttgctacattgatgtaatacctatttcattgttgacctaatattgttctttaagtgggagtgcttgttctttttgaagggacactcttcgtttaataaagaacaagtataattcgcccaaaatagtaagtaaccataagcgttgatatgtaaactctagtgtttgtgtcctacataaagcgatttgtggtatgcaaggacatatacataccacattttgggaagttctgttgtagattgtaccagctgtattcaccatattcttggagagtcagatgaataaatctacccgcttccagtcctttcctcccatctccctctcccacactaaagtgaattgtggggcatgacacaagttggagagaggccccagggagtgttccaggactgagggaaaggaggatttgtggctactctgtgccctgccaatggaagtaaaaatagacctacctcctggggttattgttaagtttcagtgagccagtgcatacggactttgcttattagcacaatgcctggccttccacttttcctgatcatctataggcactggccccttgaataacttcactctgtatgctgggtatacagtaatattgccagcgctgaagcagaagatgcagacactgtgaaatgtgctgtggtcaaccaagctgtccacatgccaggagatttatttcccatctcttcagcaagctctctccatcctgggtggcatagagtagaagctgagagtgtgggctctggacgccgacagcatggcttccaatcctggcctgtccgtcacgtgtagttggtaagtaccttatctttttcatgtattcaacaaaaaaacactgtgtgcctgctgtgggccagccactgttctaggctctaaggatttgctagtgaacaatctgagggacagaatcatgcctttgcggagcttatattctggccttattttagtctcttaaatggaagtaataatagacttacctcctggggttattgttaagtttaagtgagccaatgcatacagagcctgcttattagcacaatgcctggcgtgcagctattacttaataaatgctagcttttcacttatgatactcttgtgcgcagccttgcaccaggcttagaacccattttcatcattccgttcctgctctggcttcagtagcacccaactgaaatattctctccttatttcttggcctctaagtaattcttgaaacctcccagctctaggaacctcttatggcttgcagcctcctcacctaatcatagcactcgaagaactcctggtcacctcctgaaataagcttactcatcacctagctgctgtgatgagttggcattctcatctcctggatgacgttttttggaaaggatcttttgtgaaaggctccccctccccaccccgtctactgccttttccccccagtgcttcctcttcgcttcctgtagtatgagggttgttcgggcagacatcctgaccttgcagttgctgtaaggatctttttaacccagttctttacaggaaaactcactgtagcatggttggtctaatacagaggtattttttcatatttttagagctggggtctcactcttttgcccaggctagagtgtagtggtgcagtcatggctcactgcatccttaaacttctaggctcaagcaatcttcctcttttttttttttgacagaggagtgtagtggcgtaatcttggctcagtgcaacctctgcctccttgggttcaagcaattctcgtgcctcagccacccgagtagctgggattacaggtgtgcgccaccatgcccggctaatttttgtatttttagtagaggtggggttttgccatgttggccaggctggtctcgaactcctagcctcaagtgatcctcctgcctcggcctcccaaagtcctggaattatgggcatgagccaccacgcgcagcttcaatcctccctcttctgcctcccaagtatctgggactataggcacatgctatcatgtccagctaattaaaaaaaatttttttagcgatggggtcttgctatgttgcccatgttggtcttaaactcctgggctcaagcagtcctcctgcctcagcctcctgagtctttggagttgagggcataagccaccgtgtctggctcctaaaacaggggtattgatgctgggccttagcaatcaattatctgtgggagggcttgactgcatgttaattctatataatttctttttctttttttttctttcttttttttttttttgagaaggagtctcactctgttgcccaggctggagtgcagtggcgcgatctcggctcactgcaagctccgcctcctgggttcacgccattctcctgccttagcctcctgagtagctgggactgtaggtgccggctaccatgcccggctaactttttttgtagttttttagtagagatggggtttcaccgtgttaaccaggatggtcttgatctcctgacctcgtgatccacccgccttggcctcccagagtgcggggattacaggcgtgagccaccaaattctatataatttctaaaaagaaaaattctacctatcctctctgtgtaattgacataagattttgtcctgggttcccagcctctgaaaggcaataccaggtcagtctccattgacttcagcactcagtggcctgataggacttttgtgctcggccgtgccacatggctgactgtttcagaaggaaaccagactgctctgcccttcaaagagtgggagggaactgggtgacaggggtgacttggacagtgtgtgtattaatcttctagggctaccataacaaggtcccacagacagggcagtttcaataacaaaacttggtgttctcataattctggaggctagaagtcagatcaaggttttggcagggctgttttcttcccaggtctctctttttggcttgtcttctcccagtatcttcacacggtcttttctctgctgtgcctgtgtcctaatcttcttttcttataaggtcaccatattgtattagggcctgccctaatgacctcatttgccttaattacctctttaaagactctatttccaaatacagtcccattctgaggtactgtgaatgaggacttcaacataggaattttaggggcctcaattcagcccttgacagtgtggttcaggaatgcagttccaaaatacactcatgttacctaagccttgagttcctcaggtgggcctctgagggccagcagggaagacaaggtcagccagctttaggcttgggtgtggacttggtggccaccattactagtttaataagatcttactggtggcttaggcaagttggctgttcctcaggagggttggccaggcctgaagtaggtggacagtgttatccacaagtaggtaagctttgcttattaacccttgtgtcttggctactttcagacaggagttgagaaagaggagtaggaatagtttggggaagaatttgttgatagtaaaagtgtgatattgtccttcagacaagactcagaactttgtcaagagttgggaacaccatggctagagccttccggtaatctgcaacttccctgttcttcctgttagatgtgctgtaaacagcgactgcctacaagagaggtttggaatctgttgactttggctgggatgtagcctaaggagattcatcggtttccaattcctgttctctcaggatattaagtattgccatgaactggaaaatttttctttattaaaattggaggaagagttggagtgttttgaaagagacctggaacaggaagggagctgacatgagaagttccactgcattgcttcagagatgatttttatcttttttgtgttgccggtgctcagtggcttaaatcttcagtacaacaaggtgagataaacaagtaaataagattctggaagtactgacatggtagctagcttgtgaggcagtgtagtatggtgactaagtgtacaggctccggagtcccactaacccgcattcagaacctagctctactgctcatcacctgtgtgaccttgagccaattatttaacctctctgggcttcagtttccctatctgtaagatggtaatgatgttggtacttaccacactggttgttgtgacaatcagatgagataatgcgttagtgcctgtagacaatgctcaatagttattagccagttattagcctctgctcttgttatcaatgtaggatgattgagaggctgtttccctagtcagttggctggctcctgactcagggatagagcaacatcatattacttacggaattacatgatttttatcttttagagacagagtcttgctctgtcacccaggctggagtggggtggcatgatctcggctcactgcaacctctgcctcccgggttcaagggattcccctgcctcagcctcccaagtagctgggattacagaccagcgctgctacacctggctaatttttgtatttttagtagagatatggtttcaccatgttggccagtgtatttttagtagagatatggtttcaccatgttggccaggctggtctcaaactcctgaccttaggtgatctgcatgcctcggccttccaaagtgctgggattaccggtgtgaaccaccatgcctggccagaattacataatttttatgcttgcttttctatttctattttagctatgagaactcactttagtcttttttagagaacagcagttacactgaaggaggacatttcttttaaatggaaaagagtattttttaagttatattttgtgttttgttataaatctaaggttggttagttttattggttaaaaaagtttgctaagtgatgagggtcatggattcttattcactgcacacatttattgagatgtccctgccaccttctagcaccttcccctgcttcctttgcagtctccaaccacactggctgtcagccctggtccaccacagggcctttgcacaggctgtccccaggacctggagcacttttgccacttccccttctcaccactttcagactcattcgagcctcactttccccggctagccttcctggtccatctgtgctactgctgctcttttcttcttatttttttgagaccaggtctcactctatcacccaggttggagtacagtggtacaatcatggctcactgcagcctcaacctcctgggctcaagtgattctcccaccttagtctcctgagtagctgggaccacagacatgcaccaccatgcttattgtttttttttttttaatttttgtagagatgaggtcccgatatgttgcctaggctgtctcaaactcctgggctgaagccgtccacccgcctgggccttccagtgtattgggattacaggtgtgaaccatggtgtccagcccctctgtgcttctgtaggactctgattctttcccttctacagcatagagatattgctaactgtacactcatttgggtacaatttgattgaagtttggctcatcattagatggaaagcccatgagggtaggaaccatgtctttttttgtttaccatcatatactgagcagctgagagcaacttggtgcatgatcgacactggataaatatgtgttgatgagtgaatggatatcattttgatgtaaagagtgttaggtacagtgaaggctgcagcgataaagcctgctcaatctcttcccctaaggagcatctggtatcatagagaacacaattaaatagtgccataggaggagtacatgagtgaagccacaattcacaggaggatagtcactctccattagtggagaagcaaaggcatcttgtaggagatgccatgtgcgccctgggccttggagaaagaggagttgagtcagaagaaataggaagaagagacacatgagatggaaagaactgtgtgagcaaaggcttgtgaagtgcagtgtggcttcagggaatgggagtcacatggtttggctggagcccagctgccttgcagggaagcagtgggtggtaagttggaatgtatgtcacagccacattgtggcaggccttcagtgccaggcaagtcatttggggttggttcggaggaaaagatagggggaaggtgtgatcagtccttgagcagagggttagtgtgatcagcactgtgctcaagaagatagtgtccagtgtggtttgcatggagtgtggaggcaggagcagcgggagggggagcaggtaggagacagagtgtgggaagaagagggcttacggagaaacctacaagtgggctgtgtagtgaggagagagagcacgtggatggggcttgatcactgactagatgcaggagccagggcagagggaggggacagagagggtgatgggattttgcatcttgggcttctgagactttaatgattcttttaaattaaggaactggaaaacactcagcatggtcctggaagtgtgggaagttcagtaaatgttagttctctccccagtgccagaaatcaggaactcaggcagagaagcagatgggaggggagggggaaggtggaggtgctggcactgtattcaggtgatgagacccagcagctggctggaaagagcaggagcagagttggcaagggacagtggcgagtgccaccttcacagagtcattgttgaaaacaagggagagagaagaggcttgggtagaaccagggaaccattcccctttcagggtaagaggaggaaaagtgagaggcaagtgcagaacagtcagagataaaggggaaaggcactgagaggatggtgccttgcagtcccgggttcataagacaggtcttcctgctgtagaggtgaaggataagagggctgttggtggcctgtgggtgggattgggtctggggtcgggcctcgatttcagcctgccatctttgttactcacgttccctgaccacagacctaatccccatccctgggtggccatgtagtaagtgcccacctctcatgaggtggtgtggacacatcagctcaacttcagtgctggcctcagtgacttgccaggagcagtcattacatctgtgctcgccaaattgcactgtttgcccctgctgcagtgatggtggagagtggttgtatcagcattatttttataggaccagccatactaatgttgaaaagctcaggagacttacttaaaattcctggacagaacctgaaatctacttggagtttggggaatcagagttttagttgtgattcatttgtgaactttgacagctttgttgtcttctctgagctttaggttttggaaatgagatatgagttatagggtgtcagaacaggttctgggcttgtatttaaggttctgctttctctttcttagcatgtcatccagtcctaacaccaggaatgtagtttctgttccagtatttgttaggagttgggacagcttgggtattggcaggcttccttggttctgcctggcctggaagtgtatctttccttccaccgtgccatgtgggaccacaaaggagaatgccatgtaccaattattgtaaaaaaaaaaaaaaagtcactctggtttaaccctctgtgatctgggaccaagccaggctccactgggccttgttctggccagccaagccatgccccggtcaggtggcacagcctctcccccagcctcttacctctgcacacccttgtttcttggtgctgtgcccataggtgtggcattgctggctggggtcagggactgacggcacaggagacagggctgctggagggaggaccttttggtggctgcaccgtctgctgtcactctgacagtaggtctacttggggtctctgtcctgtcctttaatatcatttaaaaaagcaaggtagtgagatggctcagactctggagtttggatcctttatttattagctatatcaccttggagatcacttaatatttctgagtcttcatttcctcatgtataaaatgaggaaaatgacattaccaccttcatggggctctcaagaaaaacaaaatgaggtaacaattgtaaagagcccgattcacatgctaacatacacagtaactgtaagctgtgtttgtcgtcattgtttccccactatcagcaggagggaagagctccaggtaccctcctgtttgctccttcttgtggcacctctcacctggagtaatgtggaggggacccacattagaatgccccttccctgaccctatgataaggttcaagccctaccctcttttggggtatatctgggaagggtgctcacccagcttctagccttccttcaactccacctggacattggagccagagctgtgcagcacagtgagtcttaggggtgatttggttgcaaggagaaactgcctgctcagaccagctaaagagaagtttattgctaggttactgggatgtccctgtgcctactttttctctagggcagctggtgtctcctcttacttgcctctatggactggttttctgcctcaggaggtcaccctagtccaagtcgaaaacattcctcagtttgcttgtctaacgtcaattaacaagttcctctgtgccctaattacaaattcccctgaagaaaagcagattggccccagtaggtcagaggtcaaccatggtccttgcagtggggagtctgggctgtgggtgggtgggcatgtttcatctcactgatggggtagacaggtcacaaaaaggacacctggacaagtcagtcacacccacaggtgacataattttctggccttctggcaggagggaaagccctctcctcccatagcctgctctgccaggcatgtgcagactgaggctgttaggtcttctggagtttgccagaatagacagccttctgcatcacaggccatgcatgcctcataaaatcctcacatggttccagatctctggattacacaaactgatgttacctgaacaggaagagtagtcatatataggtgataggggagatgattttaggtgtacagtgacacaatgttttatactgataattatatgctgtatttggaaaacttataactaaggatcaaacccacaatttcacaatcattacatagaaaatttactttcattatagatgtaagtaataatgagtttcttataaaaatttacatagtatggacttgattttttttttaaagtgaaggtgggataattgaatgatgaaagttaagaagccctgactggtgttgcatacaccagggttcttacctgtgaacctgtgggaagacttcaggaggcctgtgaagcccttgaagttgtagacaacattttggatttacttaccggtctgccgttgtttgtggaggagggagagtgagtcatcgcttggtttagaaatttagtgttggaactttctgggggttatttattaaaggttccaatttccttccccagagattttgatgtagcagtggaaatggaatccacgaatgtgcatttcacatgcatttagatgaggagtgcaggtggttctcagacctcacattgaggaacactgcttatcaagagtttcaggagaccccaacgttgagaattcagttctgagccatcccaacttcttaggattgttgtgcggtggttaaaactttcttgttaagagtttttgagatctttggacgaaaggtttctggataaatttatatcacaaattagtaagggtttcatagtaaggtggctttcttttccctgatcagtcattttgtggttgggtttgatctttttagtccaagatgcttaaaaaaacaaaaaaacaaacaaaaaaaacccacctaaggctcatattgaacattgccatcctggagctgaaggcggtagaataacttcaattcagtgttagagagagacaatcacaagtgtttgtgagcggctacgatggcctccagcatggttctcaaacagcaggggtgtatctgtgcagcagtgggatgggcagagctggaccttgccctagacatgcagagcagcagttacactcttccatttagaaaacaaaagccttttcttttgaatggatcttgatctttgcatgttcataaaggccataataataaaacataagaatgaaacatttttaagcaattgcaatgtgtcaggcacatcacgtatgcattttcttatttttcccggaacattatgaagtggagtctattcttgattgcatttcatagacaaggaaactcagacttcaagggtaactaggtaggacagccaagatgactagccttctgtccctccacctccgctagaaatcaaattacccgggaaggcaatgccaggtagtggtgggattaagtagcttttgctctgcttagagcagacaggatgccaggaatgaggactccttgaggtggaactcaagtggaagatgagtaaactatatcttagagctatattacagagcttcttggtattctgtttttattttccttttattatcccctatctttaaggcatcttaactatgtttctgtggaccaagagaagagcgggtgaattactcacacatgggccaaagtgatcaaaggagtgcatctctctattccaccccaagctagtttggtgttggcagcagttggcaggcttcctaaggtagagtggtttttttttttttttttttttttttttaaacttggcatttcaaggactgccttacagaggtgggaggttcttttgatggcccatagtagagtttggaaattttgtgtgtgtattcccatacctgcaagtgcactcttacatttttctaggtggtagagtccttgacttccattatagtctcagagtcatctgtaaccctgaaaagataccttacagcaaggggaatgttttattgctgggccatggctgggaattatcattcctggaccagcaccatcaacatcgtctgggaatttgttagaaattcagaatcttgggccccatctggtagctgcagaattggaactggcattttaacaagatacccaggtgatttatctacacattaaaatttgagaaacacttggactgagtaacccttcccatttggtgacaatttccagtgccaactctgtgtaggaggaatttttattaagaaaagccatctttccttacagctttgtttagaaagtagggtgcctctggtaagtgtaatagttctcatctttgccccttacgtattggtgctcagctgcttataaattgagtcagatctagataaaggaatttttgtcctacatagattaattgacatgagctgttaggttggccataaagggctgacccagccctttgagggaaataaaaagttagagatgacaaactattaacctgttaaacatactccaatcccccataaagctgttcttctaagagttcattggtgggtttaaggaaatgattgcactggcttctcaacttgtcatgattaccttggaacagtctttactggtctctcttcttcctcttcttgccttttgcctagaattgactcactctccatctttctatcacactaactgtttgatgaatcatcaacagtagggcagtttagtcttaatttgctcagagtgctgcctgatgactcagactcacagttaataaatgcagcatctttagttttgtgattatatgttttctggtgacatacatgctgggctctgttaatctcgaaaggggaaggctatcttcattttggcatgctttgatctggcagctcctccagttaatgctgaactttagctcactgttgaacattaactctctgtgagtgtgttggcaagagatctgcagggttaaatctcggtataattcctaaataggaaacaagtataatgtggtactggagatacatacacaaatacacacacatggtgtttgtgtacatatttatcagataccatatatatatatagctgatatatatgtatatgtataatatatatacacatatatctcaccatgtgtgtgtatgcacacacaccatacatatatgtatattcatgtcacaattaaagtccattctaaattacagtaaagcattcgaatggttggattgtgtgtgcttcttactggtcttcatctggaaccttggacattatattggttatatgacagtctctccagtggaggagttgttgaaggctaaaccccatattattccctttatatccctaacctctagcctggtgccaggcacgtgggagaccagtcagtaaatagttgctgagtgatggatgaaccatctagggatcaataactgtgctggtttaccagtgagcccttatttattgaaatatgaatgatgttgataatagcagctatcatttattgtatgcttaccatcaaataggcactttaaatacatttcattgtataattcaataaccttatagggcaaggggcatcactattcccattttacagctgagtttcttataaagtaacttggtcagtgtcattcagctggtgaaggtggagctgagggtggagctgaggattggacccttgggcctctggcatggaagctcgtgctaaacacatgagcatttaattctcttcaggtaaggacactgacctgtagaaagggataggaagcagcaagccatggcttctgcatggctcctgtaacatgatcagtatatgcagattacaaatgttggctaccccagtgcctggtgctcctcccttcattcagtgtgcccctcccttctgtgtttttttttctttctcttcttccctgcagaaataaagccacagacatctgaatgtgttcccacttctcccattgtccaccctaaagcctggctcttgggactgtgtgacgttatacaccactctttttgtttttggaacaaactctgttactctgccgtttgctggtgttatggcaaactaatctcaaagcactgatcataagcaagtactataagaaaaaaaaaatcctgtttccttcctcaaggtgtaggaccaagggtctggtttgaaaagtatttttattttttagattttgctaaaaatcagtgtcctgctgtcttactgaaatatgaatgtcacggtgtgtgtgttaacaagtatttgatggcaataattgcttttgacagattatagcttgctgatggttatttaaaggcagtctttccttaggctacttctgtctaccactgctttgggtaaaatgatttgttctctcataaggcctgtcgtgacagaattttcactttttaaaagtggtcgtcttatttgtaaaactgaaaagatcttttctttcagtggtttatagacaaataacaaagcaatggatgagtactgtaaaagtttggggacgacttcacttatttttgtgtgttccagggctggatgtgactcatgcacatttggggaccagctccacaatgggtttcacaccataattttttgtttgtggaacactgtatgagtttcagtatgttgtgtgtatgtgtgtgtgtgtgtacatttgctgcagttcgcgttcccatgctctgtgtcttaacagctgtgtcctgggatgttcttgcaatccaggttcttgaggatgtgttgttgcttgctgagtggagctctgctagttgctcttgcattgggcaaaatcggaatattaaaaaatccccaagagctaagcatggagtaggaagcatagttcctgagggtcgtccctatcaaacaccacaccctggttctctaagacaggacagagctggaagtgtgtggtccccaaggctcagtacttactggtttagctgacatcccacaggcaaggctgcagccctagcatcagcagctgtataagctccagagtgggtgtcccggcaagagagccagacaggtgatttgttaaattattacctgtgtgtagcttcttgcccctggtgccaggcagcatggagctcggcaggattaaaaggaggttgattacacagccagcaaaggtaggaggtgagactgccagctgctactgtgcttaactcttgagacacccacagaaaatggtccctgcagctgtgtctctgtgggacttaagaacatatagggaatgagagatccaaacacaatgcattgacaatgataggatttcctaggaagccttattaatgggcagggcaccaagagtgccacggaaggggctaggctttcagcaaaatgtgcaggaactatgtttcaggagtgggggagaatctggcaaatgttaaatatatattgaggatcatctgtcctctgctactacaggcagagaagggagaaaatgggctcttaactcttattggggcaaccaatgaaaatggatcagcaactcttttcattcattataattattcagtgtctcctatatgtaagaacaagaggacccctcccctctccttcaagcttggaaagtgggctgggataagtagtagaggcagctgtggagcatactgttctcttgctgtgcgatcttgggcataataacagtgcctcctttacaggatagttgtaaggatttaaaccaggttatgtattgaaagtgcttacaacagtacctagcacacagtacatgctctatgttagtaacagtaacttgttattgctactactgccatccttattgagtaagcaggggtccttgtggaggaagagggtagttgggagcccactcaggaggtggccatgagggacagaggcccccttccatccactgttggaggggctggagttcttggtgcccttcctgctcgaggtgcacatggggctgaggttatggagatgagaaggaggagcctgaaggctggtctccttcccgttgtccagcccagcaggggacctatgtcagcagcctctccttggggactgcctgagtgtcgtcaccctgagcagcacaggctccttgatttaatttgtttcctgcccacaagccacctgaagttcaaagggttattatttttctattgtaattccttagcgggacgatacattccttctgggacctgcaggactttttttggaaagctaaattggcaacactgactcaaggaaaaggcaagtagttaagagccgatattccgaagcaaggtattctaaaaaggcttttctgtccagtagagactccagatcagagagcaggaaacttttcctgagccagaaagtatcatttataggtgtccttggcggaatccctcagaacacagttctcgaatctgcctgtaacaatgttgcctttcccgtgctgtgtgctggcttgggaattgtggaattctgcacatgatgcatctgggtatttagtttctggtggccgaggagagatgatgaggaagcaaagatagaagacctagattttcttatcgatttgctggttaacccagggaaaattactctgtgcttcattgatagaattagaacatctttctgtctcacgagagtgttaatgaccagtcagacagtgttgaatctgggaattatttttcaaggagggggatatgatatgtgatcaaattgtcttttatatatttaacagactaatgaactgatgcttcgtctgtccattattatcagggaacggaggctgcttcctaggtcagatttccagataactggagattgtccatacacttgtcatggtagagtaagactcacatccggggtggaggaggcgctgtacacagttaactcatttaacccctaccacaatcccatcatgttaggaattgtcatactacccattttgcagagcaggaaattgaagtttaaagaggggtaaataagtttaaagaggggtaaataagttgcccggttcattcaattattggatagccatttattgaatttcaactacgtgctagcacgaggattattatcaccacggtgagtggaccaggcttgggttgtccgtaggggagttaggattcttcccagggatgtctggcaggtgacttgtcgccacaccatgttctctctcacaggattttagtggtgggaggtacagggccttcttgagacccatgaggtggggtgattccctgtgtccctggccccatcaccaggtgcgatctagttttcagccttaaagcccaggtcagtctgctgtcctctgtgcctatctccaccaagccctcccacctgctactatttcaaatgccaagacttgaaaacttttaaatacttgataaaaacctggcctccaagttaggcatttccctgcttttaaaaacagaggaagcttgagcaaaagccaacatttttctgggtgactcagacctgtcattatgtgcttcattgatataattttgagtctgtactttcaggttttcattttctttctttgtgtcacttgtcacctcacctgtggccactgagattgtcactaagtgcctctcatttcctttgggttggctgtttttcatctcctgtgaatggggaaactgagcttctgtttttttttttaaatcctattttttttctaccctattttttttctaatgaaaagccggaagttgcttggtgagacctgaggaatgagtcagtgactgttaaagccacctctggtgttggctggcctccatggttggttgtggcatggccctgtgtcctgtggtcatggtcttactacaactgtggcatctgcaggagggattgagagcttgggcgcaggagtctcctgaacgtgggctcaggtcctggctccactgcatattagtttgggagctgagtcagcttaatgcctccaagctaaagttttcttgtcttggcacagaaagccctgcataaatgatgccctttattattaatggttgtagaatttgtggtgctggtggtggaggttgaggttggggcaacatgaccagtgagtgtttaggtaactatgtagagtgtaggttaagagcatgggctttagggccaggatgacctggggtttagtccttactgcctcattcaccagccaggtgacagataatgaagggatacttacagaggtcaatggcgtgggctattgagttaatgtgggagtctgttcctggctctgctgcttaccctctggtgacccaagtctagaagctgctttaggtttctcatctccaaaatgaggaaaaaaggacctacctgtcaggattgttgggggaattagcttaatgcacatacccttagtgtttcaaacagtgtctggcacatgtaaatgctcaataaacgtcagccgttactagctaatgattctcctggcatccgggaagtgtagatactgcttttattttttaaatactgttgtttatgctgtagcccttttcagcacttcttcctggtctttgttcccttggcttttcttggtcttccaagtattgaagtaggactagtagatggttcattctgggaatagttacgcacgctattcagagggaatggatgctttgctttgtgagtttccctggatcaagtttcctctacaggtaggaattgtttccttatcaggccctcaacctggacctccctgggagccgctggcagattgtatgaaataacaacaatactcaggggatgaagtatctgttaaaaattacgagtgttgtcctctttgacatctccaccctttcttatggaaaagattttgagtgcactgtagctgaaagattattcctgcactctgtacgattccacttttacccgtgcagtttcccttcttttcttggtaggtttacagcatatgcaccacaaaatgagtcattatgacttaagttttttttatttcttttaagcccaacatgtaggtggtaaactaggatctttcctggtcaattctaaaatggttgggaaaatgaaatttaaaagaaaaacatggagaaggaaattaacaagcatacattattcttttccccctaaggtttttgccttcacatggggttgctttcattttcctgacaattagttgtaactaaaatactgtgtgtctttggaataatttaagaagaaaggttttgcccccatgaggcatcaaccatgtgcagggtactggtgatggacggttgctgtgactggggtagtctggtttggcaagggcttgtcatgtaggggattgtctctatattttgaggggttggcaactctctccgcatgctcagggagagttgccacctggcccatctgtagagtggcccaaatctggtttttgcctcctctagcaagacgggtttggtgtgctaggtgattctgacacacaccaggtccccgccttcctccagcagcctgaccctgtcctcagtccaaagcagctagaaggcctgcgtatctgtttcacctgttaaagtgtttctgtgtgctcatgatcttcactactggtgtgttattggaagttagccactgtgttcaaaagaaaggcacagcttgattaaataggttagtaagtgctggttaggcatgtgcttctgttgagtcagggaaaggctggtggtgataaggagaggaggctttgagatttctgtaacctttctgtcctctagatttctgaggttgacacttggtaaagggagagagaatgctgtataccatcatattctctgtgcaggacccaaccaggttgaccaaatgtcctaggtcacacctgctatctcagcatgattattaacagtgccccctttctcgaaaccgtctgtttggatctggccaccccatgtatgtgtcacacaggtctctttgaaacttttgtcaataggaatgaacctcattttccagtggccttttcccccttagtagatcatgataagagtgagatcaccttcttttccacccaaattagcaagaaagaacagttctgtgaatagttgttacaattctcaccattaataacttcaaaaagctagagatctgcagagcagagggcacctcacatcaccattgtggagagggtgaggtgcagtgtgatataattggtatttatctctgtggcctgcttgccgcactggattaaaacaaaccaagaatttcaaggctaattggctaaaattatatgtgtaattagagagagtagaaaagctaaaggaaatgaacttacccagtgtcacctggtcaagcaggtaatggtgaacaaggagtgtgtgcccaggtgtgtctggctgtctccactgccccttactgtccaccatattggcctaatgttttccactcatgacactgaggatggtgtcattctcagcatgcaggggatgagctgattcagagcatggtcattgttcccactgctgtcttcccacagctaggaagtggcagaggttaggtttaagctcaggcctttataccattattactttggggagggctaaatggtggatgttttcgacctgatgagaatagtaggaaggggcaattggtgtgaggaaatattggcccagggtgaaccttttcaagtttattggtgtgagttaagtcatttccctagaatgttggccaagcctcaggaacatagcacgtggggatgttattcatgttcaataaatgtcaagtagcatccacagatttgtgggtttgtaaatccaaatggagtgctattattcaggtttcttgcatgctcaggattgctagcatttgtttttgaacagttctaataaaatagctcattactatcaagtatggattaaatacctggctgagaaaagtaaggtgatttatatatcttctaattagtgcaattgagagtgactatggcaatgattaaaaattattttgtggtgataataagttgcggtggagggtaggaaggggaagtgaaggatttttccgtttgtgttacatttccacaggtttgggatgtttctgacagtacgttatggcagtcagtctgtttttccataattgtgatgacctctgagtgaagacttgacttttaaaattaatgatctgatcaatgcactctttaattaatatagctgtgcaggtggataaaaaataccggtcttcaaaaaatgttaccgatagtatcaattttcactggggcaaaatgaccagactagcatggttttgtattttttctcccaagcagttcttgtgggagagacagacagacagatacacacacaaaatatgtagcctctgggagtcaagttcatctctttgccattgtaaatactttggccattgtgattagtcactcagccagactgcgccgtatccccctctctcagtttgtatcattttccttgatatctgattccacttacatgcctgctctcaaatctccatagctacgtgaaaatatgtatgagaggtatgttttttcagacaggcaaatatgaccttgcagatgagctcctttcattattaagttttacacaaaatgctctgaatacaaattataatagcacctaccctgtaggagtgtttgtggggactaaagatgataatccatgtgaaattccgatcacaatgcctggcatgcacataggtcctcagcctgttagtgtctgtttctttcttgctttctgtggttccctgatttgctgtctccaccctgttgagttggttctctcagggattccactgatcacgatggagccagatcccaatactctgtgctcagtcatttgatatctctctgcctcgttcaggtgctgaacactctgtccatcctggaaacagttcttctctgggttttgtggcactgtgttattctgattttctcccaccccctggcctttcctcatctcctttcctttgctctttggtctccttttttctccttgttgtccacagaagacaatctctgagtttctgtgctcagttcatttaggttttatcagccgtctgatttacgtctgtggatgaaattcagatgttcacccctggcttgatttctagggttccatacatccatttccaactgcatgcctaattacctctgccttgatgttgtttcatgtcagctcagatccaacatgtctcaaacgcaagccaccctcccctcccttctccaaagtatctcttcctcctccaaaccctcctcctcctcctccctctcccaacctgcagcccccaccctctgccacccatccctgggtctttggatggtgaagcccttctcttaccacctcctccctttaccttaacactttgctgctttttctatctcccattatccagtgggtagcaatttctcatggattcaaccttgatgattccttcttgcatttgctttttcctttctctctctgctccttgcaacatagctacctacatagccgcttgactgactcttgcaatggcttctcacctcctgtgtgtctctgtttgcatcagatttactgccgccccattactcctcctaaagcacaggtttggccatatcatatccacccccaaatcttcccttggctccctgttgtctattatgaagacataccaaaactgtacacatgtcctttggtataccctgtcagtggacacaagggatgctgttgttcagatggtcacagataatagtctatttttgatgtcaacttagtggtcccctggtgagtgaagtgttatctgtttccctctaataaatgctatggactgaattgtgtcccctgccaaaatttgtatgttgaagccctaactcccaatataactacttggagatagggcctataaagaggtaattaagtacagttaaatggggttatatgggtgaggccctgatatgataggattagtgtccttataaaaagagacaaccgagagcaggctctctctctctctctgcacacatgcacaaagaagaggtcatgtgagtgtagagccggaaggcaagccaggaggagagcctgcagcaggacctgaccttgctggcaccctcatcttgtcttccagcctccagaactgtgagaaaataaagttctttttcttatggcagctcaagctgactaatacaaataacaaacacttatttcaggtcttttgtgtgcctggcacaggacatctagggaagcgtggccccctgatgttatgcagtttaggtaagtccctctgtccttgccctgatgtcttgcagcttttggtcaaaatgtaagagcaagacactgtgttgggcattgagtttacaaagatcatgaagagcttatatcttagaaggaaagaaagagaaatgattcagtgggagttgaatctgctcagatgcttaagacacgggtatagctgaaatgatgagctaggcaagcaatgtaaggaatagattataatattaattatctttcagctcaacacagttcagtttttttctagttttttacttaaaaattttttttgattataaaagaagtgaaaactacctgtatctgtagaatatttgaaaagtataatatggaaaatttgtaaagcagtaggatgaaatacactcataatcttaccacagagaacttttatttctttttttttgtttttgaggtggagtttcacttttgttgcccaggctggaatgcaatggcatgatctctgctcactgcagtttgcctcccaggttcaagcaattttcctgcctcagcctcccgagtagctgggactacaggcacccaccaccacacccggctaattttttttttttttttttttagtagagatggcatttcaccatgttgaccaggctggtctcaaactcctggcctcaggtgatctgcctgcctcagcctcccaaagtgctaggattacaggcatgagccactgtgcctggcccttttattccttttttaaaaaatattttttaaaaaacatgttcatgtacttttaaatgtgtactgtttctgttttatggatataagataattttcttacctcttaactttaaacatttagagtgtttcctttttaagttttttttaaactattttaaagaatatgatggacatttttgtatgtacttttttcccccatttaatttccttcaaacagactccttgaagtggaattacttggtcaaagggcacaagcatttttaagggctttggggacatcctacctaccgctgatatttgcgctctttctgtgtgagcaagggtcatgtttggctttggcattaggggcggaggcctggggacagtgagaggagaatgagatgtggccactacccctacagagtctgtgtaatctaccaagagaggcatacccagaagtgtgggagctgtgaggaccttttactttgtaagtaatttacctcgtctttctgaaacaacacaaaaatttcaaactaccacttggaaatatcttgaccttggcgttggtaaattttctgggatttcggggccatctttagactcataagtgggacagtcatgcttttggcaagaaagaaacatactcatatttaataagccatgttcagttttaaactagatttgtgtatgttatatcggggtgcttcttgaggaaattttgattagtggacaaaaaattatgagcatgataatttatttccttagccacatacccctatttctcaaagagatttgccaagaaaggcttattttaaactatttaaatgtaagcttagcatgtatccagaaaagtacacagctcagaaatgcagagcttgataaattatcacacagtgaatacacttatgtaatggcaacccaggccaagcaataaaaatgattagcatcctggaaagctccatctcatctctagcctttccctcttctcctagagcaaccattcttcctgagttccagcaacttggattttgcctcctgttgagtttaagaaaagtttttaatcattttggaaacttattttaaaaattaaattcaaaagccctagctaatctacctgtatcctttatctattatggtataacaaatcttcccaagcctttgagaccaaagatgacaatagtgtttatttcttgtgactcagtggattgactgggtggttctgttgtcctcttctgggctcacttgtgcagctacattcagggcggggaccacagggcccctccccatgtagtctttcatcctgggcatctacatgctctggcagcttcagggcagctttccaaaaggacaaaggtggaagctccgggcctcttgaggcctaggctttggaatttgcatggcctcacttctgccacattctgttggccaaaacaagtcacaagggatccaactgtatcacagaatccagagagtggagaaactgcctccaactctgaatgggaggaatggcaaagtcacgttgcaaaggaacatgcattaaaggtgcgtggccattagcaatctaccatatcacccaaagagtgctatgatcctgtgtagaccaagtttattgttaatacagagctctataatactgagactctgttccacctggttcacgtgtgaacactgtcagttgacagagccaggatgcctggggctagtaggggatgtattgtctccatctgatagaagaggattagatcagaaataggagagcttttaaggattgcttttctttggtaaatcaagtttgatctgtactaaatcattttctttttcttgatgtttctttcattgtttgaaatagcctctgtttatctcatgaagtgatttgaagttaatgctttaacaacatgaaaacatttctggacttggaatggctgttcttcaaagcacatttgtaccttaacccatcagagatagaatttatggtatagagatgtcttctttttcttctggttctagataccccgtgtaagagagtattcaggtggccccattcatttaactcctgggtcttgcaatctttatcaaagtgaaatagtcaaggtaatatcaagtctatttgatacaagaagagtctctgattcatcaaaaacatccaactgacatattacccagatagatgcttatagggtggttaagtctcacaatttctttgacttgtcttttacccaggtgtcttttcaaaatggagggaaatggtgttttggatttgatttggtgatttcgtgatttggtaatgataatagcaaggagtggatcctttttattgagcattttctatgttcatggagttccctgagcttagtacttttcacacattgtctcacagggtttgtggggaatgaaattaggtaacccatggttagcacatgatacataataaaaacccaatagtggttagccaccaacaccaagagatggataataataattttcatttaatttagctcttacagtgatctcaattagattctatttgtgttattaacttgtacaatcaaatcatcacaaaaccctctaagattagttttagtattacacccattttatatattaggaaattcaggtacgcagagttgaagcaattcacagagttagtaaatggcagagccaggatttaaacccaggccagggcatctgaatccagggcattggtaccctttcttggttcttgggaatggaatcttcacgtacattgacttggtgtctggattcttggagagcaaaagtaagatatcatcaacccacttccctcctctaatgtttaattctgggtccaggcatcctgggcaggggctctgaactggtgatgccaagttgctgcttcactcagttaatgatctctctggggttttggcttttcacttaatctgtggttcattcttcccctctgaagagaggagctggcttccttaaagcctgacagcttttttccccggtgatgaaccagtcatataaatcatttacaacttactctttaaagagatgttcctttttcccaatgccagaattcaagatactctgtaaggcaggagctcaaagccctttacctgggctaattagaccacctatgctaattagaccacctcttctcatttctctgtttgaggcttcaagtaagaagaagtctcccatgcactcagtctgaagtaatttccatagttttccttggcatcactgagtattttgagacatctcgaggcctgtgttttcacagaagttgtctccgggttacttagaagagtaaggattggaatagaattgcagggtaccccagttttagtctccccatggagtagttcaaaggagtttgaaattgcaaatataaataagactttatggttcatgttgttattgccacccttcccaatttagaaaacctttggatcagataccatactaggcattttacaggtattatttcatgtattctttaaaacagttttatgagattggtattatcgtacctactttccagacatggaaactgaaggacaattatgtaacttgcctcaggtcaggtagggaggaagtagcccaggtggtactgagatcagagctcaggtttttcatatttcaaatcctgttttttcctgggtgacttaccccattgatgtgtccttcaggcaccctttaaatctctcgcagaacgcatttggaaaccaaaacggtttttgtctaaaattcattatctggaacttctgtagtcagtactctttcttcaccttatcctctttccattttttcctctgagttcttgggatgaagtaatgaagtttggaggcaagaaggcctgggattaggttccttttaagttacttggcaagagaaaacaaaagggtagacgtcatgagaaagtttcccattgtatctctaagctcagtggaggatactctattggaaagttctgttcttcccatgagaggaattaaggaagggaagaaagatcttggcaaaattctgtttttttttttcaccctctccctctgaccagccttagtgctttgtgttcacttctgctttcctcttctaccacccaccctgggttcctcgtagtgaacacgtcattcgaacttggtatcttgttactctcacgtctcacttgagcttcacttggcgatgataagaaggcctggtttttaggcttgcagtggccagttgtgcctgcttctcctgccttgtgccctgtacttgccctttggtactttgtgcagctgcggagcttaagggtgagctagtcctatcttttccctgcagtagaagatacttttgaatgtgaaatcagtattgagtatttcgtaagatccctgattcttcttgttcctttttgggcatcatggtttatgagattctggatcgtcagccttggtagaatagttatatatttatactccagctcattctcttttcttaggactaactcaaacaatacaaaacagttttgcccctcacattgcttcagatgaaagcagaagaaaagaatagttatttatgtacataatttcacagtaatcagatctttcatttttccctgcagggatattggcagatagcaatctgagtgtttgcaggtatgacatgttgagggtaggctgggcgcagtggctcatgcctgtagttctggcactttgagaagccgaggcaggtggatcacctgaggtcaggggttcgagaccaacatggccaacatggtgaaaccccgtctactaaaaatacgaaaattagctgggcatagtgggtgggcacctataatcccagctactcaggaggctgaggcaggagaattgcttgaacccaggaggcaaaggttgcagtgagctgagatcccaccactgcactccagcctgggcaagagagtgagactccatctaaaagaaaaaaaaaaaaagttaagggtaaaatattgattgattctgtagtaatgtttgtatggtaccttaacaaggaaataggttttgcatttttcttcctccttatagccaagctttcattgttcttaccttttgattgaacagagaaatacaaaggaagttaattttataatgagatggccaaaggcataatgatatactaatgcaggtatgaggtcaggtaaacctgggatagaatctaggtttagccacgcttattggctgtgtcacctcagacaggttgttgaacttctctgagttttgcttttatcatcttggacaataatgcctacatttcaagatggttgtgaccattaaaaataattaaatgaattcgtaagcatcttggagtgtcctgtatatagtggggcttatatattattgttcttattttgtttgctacaaatgcacagaacaagctggtttgaggcacttgtgtctagtagtcatgttgtgggatcaactttggaaaaagagacagctttggaattatctagtctgaaattttcattatacagacaaggaaacagactcagaaaagttaagtgaccacgtcaaagctgtagaactggatagggacaaagctgagactagaactcgtaccactgactcttagcttatggtctttttatgccatcatgacttatttggtctagatatgtataccagcatctctagggcaagatttactaaaatcacctgggaagtagtagtgttgatgtggttaaaaaaagtaccttcctggactccgtcctagattaatgactcaaatctctggagtataaccagggatctgcattttaacaaacatttcagacgattcttatgtattttataagtttacatttattttgtgatgtaatacaaaatacatttacaaagtgagtttgagatgagtcgtttgagtttactgggtttgagtctctgttcttatgctgtaattaagatttgattttcacagagttatctgagcaccttcagacacttaaagagtgcctggcacatagcaagcactttacaagtgttagttataataaccccatttaattgttataacaatcctttgaaggtttttttttttatttcttttacagatataggaagctaatgtacagagcggtcatataacttgcccaaggtcatccagctaacagttgacagagacgatacttgaacttctgtgtgtctgatgctgaaacccatgtgggatagtagatttttttcaataaatattgaaagttaaaggatttttctcattaaaagaatacccctctgggtttggttgatattagtctgttgaggtagaccaaagagagacctcatataggtaaaataatccctattctggttttcaaaaccaaaaaagttctggaatgaggctttcctgagagtgagaaagctggcaaaaacaatttgttcgaaagggaaagtttttattttcattctctgtgcaaatgaaatggatggttaagggagaaagtggcagctggccgaagagcttgactcagcttcttcaagtccaaagagctcagagactggagaccttggggaaattttgtgtgctgtccagttttgtgttgcgacagagagagagagaggaggggaggggaggggaggggaggggagagagagactgagctagcctctggagttatgcgtattattttccccatgttcttttggttgaggcagttgcagtggtccagctaggttcaagggaatatagaccccactgcctggtggaggagtgcctgtgtctcattagtcattaagaagaatatgtgggatgggatgtatgggtgtggctatctttgagatatagaatctgccacacgttttgactctactgttgctaaataggttcattcaaggactgggtagtttttgaggtcctttatcctcatagtcagtgtgatttatggatttgccgttgttaaaaaggctaaacttaaacagtttttgggtggaacctgaactgtgtttattcagaactatgtaaatatatgatggggagtgtctggcaaagccttacctcatcatggaggaataatacattggttatttttttcttttagtaggaaataaatccttagtctttgtccagaatcttaggcagtacataatcactgtttttgttgttgttgttgttttttgactattgttaaatagggcctaaaatgtcttaggggtttgtgaacaagacagccaaggttctactcttatgaaccttcaagtcatgtggaaaagacagacagtaaacaagaaaatgtttaagagttgtgcttctaaggttcctaggtaaatgaatggggagggcccatggcaagtggtagttgtcatcgtcttatttgagcctagttggtcagtagaggcatcagaaaagccatgtgaggagtttcacttagcctcttctctgaggtcctggtgtgtgtactccacccagaagctgagatgaaattgtcagggaacaaacatggacttgttcacagaatcctagaataaaagctagattaagcaacccttccatatctactctgccagttctttttcttgccttcctcctccaaagaaaggttcagtagcggtaatgtaagaacataaaaggaagtagtactttcacacagcagacagtaaacacatggaatttatgtgttttccttgagatggaaagtgtgaaaagatggagatttcataagttcatgaaaactggatctataacaggttatttagggaaattagtaatattatgatctatgtctcaccatttaaggatatccagggacctctgcttgatttcctttcctcatcttaccccacccatacaataaagattaattgcctggcttctttgtatcagcctcgggggtctggggataaaacagcattcaggcttcctaccttcatgtaggcagacaaagaagaaagcaatgagacacaaatcactgtaagtcatcaactaggaaagaaacaaatcctgggtgatagggaaagactaatgtcagatgaagtgtcaagatctgtccctgaggaggtggccacaggtttcaagtctcacggtgctaagcccaacacctagactggaagatatattaggacaaatccaggacatcattgccgttacgtttacggtgtaattaaggaaagattgggtgggagctgaggatgcagcggttcctgcagtgtattgaatccttggagccttcacattgaataagaatcctttaccctagctggaggtgactgtttagtcacactgagtgcgggcaaccctgcaaagctcctcagcctccgagccccaggtctgatggaaactgtagatttcttggctctgctgaaagcttgtcccatgagtgcaagggagcaggagatgtcagaggcctgacttcatcttggctcctgcttttgttggagggcagttgctaagcaacgcatccctctggctggagcaaagtagatggctggcggaagagggtagagacaaggaaagtagagtagtgcctgagtcgtgtggaaggatgacttctaggaacagaaatccatagagagatttttgttttcagagggaggtcctgttgcagaatttcacatgttcattgtggctacctctccccacctctcttgtgagctctgctcttggtttaggggttcatagacttttgcttgtttggtaagagccatgcaaacctccaggtctggtggtaattactgaagcatggtggcctggtatatgagagtgcattttcccttgtacaagccttcaagggggaaagggcttttaaatgggaacatttggttcagattattttgatttgtgttaatgggttggttccaaagtcatgattcgctttgggaaatttaatggagaacacttgcagggtgttatatgtttgcttttttcaagtgatatttcccctgcattcttctgtggtcacctttccttattctttagatcctccaccaacatttcaagaatttttttgtgttctgaagcggcatgtttcttgaaattgttcttgaaaagagaggagtgtggagttatctgggtatgtagtctgtgggacagaaggtttgtggccgcttcttccattccttctacctgttaatatctacctcacccatactttgtgtcatttatgcccccgtcttgtgtgcttctaagcatagcagaacctctggttagtgcagtttattcttaggttcagcacccagcacaagaaatcttgtggagtaggatagaatagaataagttcatccctgtgtgtcgggaaggactaggagaaaaacatgcctagaggtcccacaggtgaaacccaataattgatctaaaagtgcgtagtagtagagcatgggatttagaaatctgtcttgtcacctatcagccctatgtctttgggcaggcacttaacatttctgaggccaatttcccatttgtaaaatcagaatggaaattccctcaacatttcatttggaggaggattataggaggtaatatatgcaataggcttagaacgtaattgtttaataaatgaatggcagctgttactgtgaataattgtcttatgtgtggagacttcagagattatactagtgatggtatattcttgtgggacaaactcatgaaaattatcctccttgaagaatcacatcagttagatcgacttcttgtagggatgtaggggacgtgattcaaaggtcccccaaacctttgttcccccataccctggctttttcttctgttggcatatctggctcagaggtggacctaccccgcctttggcaacttcttatacttattttctgggttgctttctatgtctggaaaagcttgccatgaatgttccctaccccctgtaatcacactggaggtttccaagaccttttggcacctcagatgatgttggatagttggctctgggacccaggcatgctcccaagtctctctggctgctgctgctgttgcttcccaagcatgcagctgaggcaaagagtgtgatcactcctgggagccaaattgaggcctgtgtctttctgacactgagtggagttcagggatgcagggacatgggctcattgaagcaactaatgtagggttcatccacataaagatgatacctttgattgctaaggcatgctgtttcactagattgtcatgattacaatgatgcctaccattcattgagtgcttactccgtgccagacatgccaggcaaacccacgtgctttgcacattttgcctccttttaatctcagtgacatacctatggagtagtgacgtataatccctgtttttctgcaaggaagctgagggttttatggtaccactacacttccttatggcgtgtttttttttgatgattaaaacatttctcagtatgagttgtatgaagacatggggcacggtggatatagtagaaaaagcattgaattataagtcaggttctaaccaatctctcataacctctaccttctttccttccacttttccttttagtttataaaatctggggcttgatctgcagaaggtgacactgtgatatggtgatgaagagcctgagctttggcttcatgcattcttagggctgagtcctggctctgccatttgttagttatggggtcttgggaagtggtgtgctcctgagccttggtttcctcatctagagatgataactgtctccttccattgttgtggggactaagtgagttaatatataataagatacttgacaagtatcattacatgtgagctaaaagtgagttttttttttttttttttgagacagagtcttgctctattccccaggctagagtgtagtggcacgatctcggctcactgcaacctccacttctgggtttgagcgattctcatgcctcagcctcctgagtagctgggattataggtacccaccaccacacctggctgatttttgtatttttagtagagatggggtttcgccatatcgaccaggctggtctcaaactcctgacctcaggtgatccgcctgcctcggcctcccagagtgctgggattacaggtgtgagccacagtgcccagtgctttatattagtctttctcagacattcttgttttccatgaatgagttagcagttttaaagcttttttttttttctttttgagggtagtgtcaaagactttgaaatatgatgaaagttcaggacaatttcccaagaaaaagcctctttacccaaaattcattttcaatttcagagggttcagggccaggaccttctagagctctttgagaactccagaataagaactcttttaggctgggcgtagtggctcacgtctgtaatcccagcagtttgggaggccaaggcggtggatcacctgaggtcagcagtttgagaccagcctggtcaacatgatgacatcctgtcaatataaaaattagccgggcctggtggtgggctcctataatcccagctacttgggaggcggaggcaagagaatcgcttgaatctgggaggtggaggttgcagtgagccgagatcacaccactgcactacagctgggacaacagagtgagactgcgtctcaaaaaaaaaaaaaaaaagaactcttttaattgattgtaggatggtagcccccgttttgcaggctattcctcccctgctctctgatgcctgctgaacttaactgagaccagcacgtgtggaggagccctctgtgaggactggagggatgcacttccttttcgtcttctcctccgttcgctagtgagcagactcctgatttcttggcctgtgttgctgcccagaacaagcaccaggaatatcctgaggagctgcagctcttgagggaggctgctacgagagcagggaaaatcagtctttctcttcctcagttgggttatttcagggatgagaggagagggagcagcaaagactctgggattttaggaagaaccaagctactgtgtgttgatcgtctgttctgtaccaggaactgtgtctaggtggtttgcattcattatttctcatccttagaagaatgcttccgggtgggtatttgttatcaccctgcttcacagatgaggaagctgagtctcagagcagttaagaatagcaaatgtccaaggtgggagtcaggtcagctctctgaaatcatggaggtcttctgtgccatgcagttcccctagatggagtcaggcctctggggtaaagggtgacttcacgccctttgctgataaaggaaatgcttttccttctggtggccagacatccgcagttactgtctttgttatgtgctctaggtggccttctcagtgctgaactgcagacccgtgtatttttagaaaaggaagaggcttctgtgtgtactgtttatgtacagacacatatcagcttctcagtactaaaatcagctaaagcagctgagtgtcagctctggctggtgtccagataactggcggccctgtcttctggctggcaggtcctcaccatgatggcttcagggacatgactgacccctcacatctctcttcttgatagactaagctctgagtccccacagagacctgcctctacttcctccccaagctcagctcttggcttgtcagcagttggtcaggctgcatccttttctttttttccatttccctgcctgcattttctccttgtttcctcacccacacttcactcacatgcctttttttcccctgtgagaccaatcacgttttgatttttttgttgttatggtcaaagaggtttattttgtgcaccgcagtgaaactggctacctaaggtatccatgtgtgaaagccacgcattagtttcaagggagggcagtgtactgcagcgtttgggtctctgtatcaccattgtctgctcacatttatagctgactcatgttgagttatatgccagacgctggctttgtgtattacctgttgggccacagttacctgtgtgagggtggttctggtattatctcacgggcctgagacctttccaaggtcacatggctggagttgtatccaagctcagaggggtgccgaggtatatgtgtcgggtgaggaggagtcaccagtgcataggtgggagggtggggcatgccacctttcgtgcctgtctcttgctcccaggggaatgtcttttggtgtggcccaggtgagccagaatttcaggtctttttgaggattagtctgtttgaccttcttctcctctctggcaaagaggatttggatgggatttcccttcagtggggattttatcttagtaagggctgcagaactgggcctgctgcttctaggatgtgctatgtcattcctgctcactcctctgctgtgaccacccctgccacttcccctttataccccagaatgaagactgcatctcatagacatttgggagcaaaagagacttacattttgtgctgtcctgtgagaatctatatataggatgttgagtaaccacttgtaagacactttggtatcttatttgagtagtttggcagatgtcctttagtcttgttttctctttcttcattcattaattcaatatgtattgattagtatgcttaaagcatacatgtatgtgaataactctcccttaaaggaggataccatggggggacagtgagatccagaaccactcggtgtgctaaggacttttcacgtcttatctcagaacaaccttatgaggtgggtaggaaacctaagaaggggtctgtgaaaaaatgggtagcggggggtgattcatgaagggccccatgtggggctgccagagtgagaatctcagctctgttgcttgctctcggtgcaccttgggcaaatcactgtgcctctctcaccttctgttttctcatctgtgaaacggggataacagtgcctgtctcatgggattttgagagtcaaatgaaacaatgtttgtaaatttcacagcatttctctgatacacagtaagatctcaataaaaggtggctatttttaaaattactattattaggtactgttatctccttgttttcaatatacagaacctgagccttggggaagctgcctcagcttaggtcacacagcgaatacagcaaaggatggagatgtcttttttttttttgagacggagttttgctcttgttgcccgggctggagtgcaatggcgcgatctcggctcacagcaacctctgcctcccgggttcaagccattctcctgcttcagcctccggagtagctgggattacaggcatgcgccaccatgcctggctaattttgtatttttagtagagacggggtttctccatgttggtcaggctggtctcaaactccggacctcaggtgatccgcccacctcggcctcccaaagtgctgggattataggcgtgagccaccgtgcccggccaggatgatgatgtcttaactgccattaggtggcacaaatagagtgccacgaagaggctcaagggagagaagcagcacctgtgttgtatgggtggtgggcagtgctgcaggtggactggcgtgggcctgggaggactccatggatgagatggcatttggaggtttggcccatctggacacctggaggtggggaagtgcaacattgctggtggagtgaacatcagggaagatactcagggttgagaattgggttgtgtgtgagctcaggcatcctgattcagagcagaggtggggctgtgtaagcccatgagggcaggggctgggctgggttagttctgtcctagaagagtgcctaccacctgggaggggctccacacacagttgttcaatccaattgaatggcagtgtctgaaggtggcaagctttagttggtgaaggggagtgatctgggagaaaggaattttgaacttcagttggagaagttgatttctgcccacagtgagacgtggaattctttcatttgtattgcaaaaggctagctctctcagccgcctggtattaaactgtaagttgctctagacactagttttggttttatctggacagtgaatctgatactctctgagctgtttggtcaacattgcttatggtaataggagattacaggactgggtggccatcactccccggggtcttttaaatttaagaccacagaaccttgaaccaaacaaaagcttgtttgaagtgaatagcgtgtgtggccctgtggttttcccagtcccattttcctcctttactcccttccagttcttccttgttttctgtggtcagattctcaccataggtggttctccagccttggcacatcagctgagtgcaggcgctcctcactttgtctaacatatgtgttagagtaaggctgtgtgaacatcatagttgtgtaggtggcgtggaagctgccgaggtgagcacagtgtgaaagaattttgcttataatgagtccttagtgaggcaaaggatggcattagttttgaacatctgtaccctaattctgtatatgattctttgcatggtttttatatgttaggttttcctgtagcagtctacaaaattggaagttccttaagacaggggcctgctccctcactatgtaacctagccatggcttgtgggaattaaccagtgggcatccgatttatgggccaggcagctctttctttcccgcctacttggtttcttggccctactaagtaatgactgtcagaggacaaacatgggtgtgttagagatctcaggagcaattggttatctttgcactaaattggttttaaactagaggtaatgatctgaaatttactggaagtctcttccatgttgtttattggttccatggtgataccatgcccaactctaacttgattttttatcaaatgtgtttattaccctcttctctgagccacaaacaacactttagaagggcataaagggatgggagtcaaggtcagcagttttgacaaatgatttgaaagattgaaaccatctcaggataattttcactagctaaagcaattccagtaggttttcattgtgaagtaggtgtggactcttgtgttctcactcttgggtaagacaggttctcacaccaaaaagacccaagacttcagagcaggggaggcacacctcttatctctcccctcccagagcatttccatttgtatttggcttttcttttaaaaagacaaatggtgcttgagaaggtgtgcatactttcaaacagccgccgtgagattttgctaacattccttctctgtgttgaaattctctcctcctccattgacagtgtgctctccatgcttcattcatccccttctgaacgtcccttccttgctcaccttctttgtcctgtggatcttctcaaggttcccttccttgtgggcttctcctccccaaccagaaggtctgcctctctttgtcactaatctctccagtccctagcttctgccaccacccacatgaacatgactcctagacttccctctggcagccccagcccctctccagttctttagtttcttgatgtctgctggcatctctaatctgtatgcattgctggtgcctcaatcctgccgtgtttctgtcctctttcctccagtctgcttcacctcccatgctccctgtttctgttaaaaatgctgttgctgtccccgtcatccaggcacaacctctggacccacatgtgatgatttgtttcacccagttagtccccaaaccccacgggtgttcttctgcacacactcttctcaccacgccaaccactgctggttcagaccctggctacctctaaactaggccccagccagagccacctcacttggatctttccttcccttcctctgtggagacagagactctgctctgctgcctcctgcagcctcatgccctcattgtgttccctaggcctcttcagagctctgcctacctctcctgctctgcctatggcttgtccccttcttttggccctactatttcccgtgtgtgcagcccagtgtcctgcctctgtgcttttgtttaaattgtcccctcttcccataggggttattctccccatctctccttggtcaattcctttgtgaccagtttaactcctccttccttagaggaacatcatcctttcagtgggggcagtttctcctctgactgaattcttattacagatgctctctctctctctctatggtgcttactgctttttctttttcttgcaaccagcattaaaaacaacaacaacaacaacaaaacacacaaaaaaacaacattctgtatttttgaagcatggtagagttgttaagagtaaattaggagtcagacctatacttgcatacaaactttcgaagttattagctatataaggtggaaaagtttcttaatatctctgagcctcagtctctccgtaaaataggtataatgatgccttcctgattgagctcttgggaggattgaaggagatggtataagtcaatgtcagacacatagtaggtcctctattagtcctatttctacctcctcccttctcattaggctgctaacttcttcagtctgcatacattttagttttgtattatgcagagccctgtgcctcatatgtagcaaataaggaatagctattagctggatagccaatggatctgaaaggactttaaagagaaaggattttaagagaatcactggtatagccaatgcttctactgtgcaaatgtctagcattagagtggtggataagctcgatatgcagtgtcaaccaggccacaggaagatttttgtatcacctctgagacacgaatagtttacactacagattaatcaggatggatttaatgatgaaataatttaattgtttcacagatgagtggattttgtatttttgttcccatggaaaatacattttttttttttttttcctgagacagagtctcactctgttgcccaggctggagtgcagtgcatgatctcggctcactgcaagctctgcctcacgagttaaagcgatttttctgcctcagcctcccgagtagttgggattacagatgtgtgccaccatgcccggctaatttttgtatttttagtagagacggggtttttccatgttggccaggctggtcttgaactcctgacctcaggtaacctgcctgcctcggcctcccaaagtgctgggattacaggcgtgagccgctgcgcccagccggaaaatacatttttgacattagctaagataacatcaggcattagcttgttagcaaacattattctaccatatccaggcttgagattgtaattttagtagttcagttcagttgttttattatgaacagcttggcattttgcccctcataggctcatgcacaagaactgagttttacctcataatcagaaggtaactcccaactatttatggatcactgatggaactggtgtctccctggcagctgtgcagaattggttataatcctttaggccctatgtggccgccccctccctcccgttttacactggtctcaccacccctgccctttctcccacgtgctggcctttagttgctgtgttttctccagccacatggtcttgtgcacctggtgctctttcggcatggccttctcttctccctcatctttgtcaggttgactttatttctgcctattaatttcacactttgtcatacagaggtccagagacttgcctgaggtcatagcaggttattcatggagtctggctatttccagggttcactctacataggcacacagtccctccccagtcttggaaagatgattcatgttgaccagaaattcagctgtcctctagcaatagtttgggtttgctgacagtctcgctccttccggaacttgataaaataatgataagcacttgttctagagggttggataggttttctgtgaagaggcaagtaatgctgtgcagaggaatgttaaagagaaaagaaagagtgaggtatgcagccgccggcaaagcatcagagaggtagtttggcctgcagggcctctgagcggtcagaggtagtttagaagggacagatctcaggtgggagtcattcagcctttgcagtgttgtgggatgctcacatatgttagtgagtattgttgaggggacctcattgtcctctggggacatggaattggccctcctcacaggcattgctgagttctttactagtgctggctaaggtcaaaggcattcttgggaaagcaagtcagcatggcaggatcagcaatcttaaaaccatccttctaactcttacaaaattcagggagactgtcttggagcagatttattttatttttccctaaatgactaattatagcattcgtgctattaatatggatgcctatggcttgtaacagtcgggatttctgttcacatctcacatgcattctcgcatgttgatgcattttggctgcttgctgcctgtggactgccagcagttgaattggttttccatgatttggtcgagtgtcttggaaggagacaatgggaaggttctttgatccagaggaggtctgtgtttccctggaactctgtcatcatgataacatgatctcactcagtaagttggtgacttacttacgttctaaaagaccaacaaaacagagtttaccatgtagaagccttgtgtgtcgctctgcctgcagtcagggattcgagctgctgtctctgcatgtcctgttgaagcaccatgacattgagcctctcctttggcacagagatatcagagtctctcttttgcagaggcctgctgctttgaaacctttgacctccctcatttctcaagcttgcctttatcgagctccaaaggtggaggaagtactgatgaggggaggccagagagtctactcagcagagagcagtgtcagctgattctcagtttggcccagaagaagtacttagactctgaagtgggtttctggggtgattggtgagaacttatctttatggtagcttagattttattttttaattttattattattttttgagacagggtcttcttttgtcgcctaggctggagtgcactgttaccatcttggctcactgcaacctccgcctcctgggctcaagtgatccccctacccctacctctgcctcccaagtagcggggactgcaggcatgtgtcaccacatccagctaatttttgtatttttaatagagatgaggtttcaccatgttggccgggctggtctcaaactcctgacctcaagtgatccacctgccttggcctcccaacgtgctaggattatagacgtgagccactatgcccagcctagcttagattttgtattgagggttctagagtcaggcttctgggttttcaccttggttctatcacttactggcaattttcccttttgtaaaagggatttaaacaatagtatctaccttgtagggatttggggagagttgaatgaataatatctttgaaagcacttgggggctagcacagagtaagctttcaacaaatcgttgtctatcatgatgttgaaaatccctcagagtagccttgactccacgttctcagatgctgtaggtccttctcagtgtgtaggcagcacttaccttttccacttgagtccacactggcaggaggctacaagcttccagagagttgggttatgcgtgtttctgtttgtagtgtaatgggaaacactaatggacagtactagcccttagtaaatgtttaataattacttgttgaaggaacgaatgaagctgtgagcaggccaagaacaacaatgtggcagggtggtgtgtttcctgtagctaagtcagttttgttagtttatgactacaagaaccttcatcatcctggagatcttgagagatcataaatgagtagcaaaatattggggaaattattatgtttttaaaagcttgtcacacaaaaaactgcatgtgtttaatggcacactttgataaactctgttacctgtatacattcatgaagccaccaccacaatattgggagaattcttaatgcctgtctctaaagtgttttatttctctgttgctgataaaccacttccacctttgccttgaatatggctccctgcctcataaggaaggtaatgggaatctgctttgttcctctccaccatattcttttctagcttgcatctgcagttttacattcttgccactgaaattttcagtgtttatagtgtgtatttgttgagtgtctgtctccagtaggttgtaggtttggggaacgtaaggactatgtcagttttgttcagtgtcttattctccatgcctcccacagtccctgaaataggaggtgctcaatgaagagttaaaggatgaatgggtgagcctattgccagaataaatatatgacactgttataatatatggccctgagttggaagcaaaggaaacttgacttgttcttggagattaaaagttattcttaccttcagcaaaggaaaatgaaagggaagaaaggtctcctaggatctgaattactttaacttcgttactgatatgagaccgagtagaccctggaaatgcagggaatctaacatggcttaagccagacccaaagatgaggcatgttggggtattgtgagacagctgtcattctgagacccagctgctttgtaggaggttaaatgttgatgttgggactttgtatttttgtttcattgcaaactgtttctctactctacgctcccatggaaggggctttaactggatgtgctgttcaaaggaccccccagtcccttttgttctccttcagcttgtggtatccttcccttgcctccacatcatatatgacagtaaagtgtttagagtcagctctgggtccctcagagaaaagtctctcttaaggcactagataaaagaagaatcacaaaaataataattaaaaatgatacaacctggcagcggtgtgtggtttgcattttggcaagagtgaagtcaccgttttagaacataaatgctctcagtggtggagaaagactggcaaaacagccttttaaaacccccattacagaaagaaagggcaggggtgggaagacagagagcatatttgtgtttgtgaagctgtttttctactaaatgtttacagaggaggtcgaataccagatgcatttagggttattgtttttttcagatactaggaggctgctggttggtctgagatgaaatgaagtggaggttttagaggtgccacttaaggaggctctcgtatcttttgcacttttgagttgtgctttgtgcacatttcatcccaggtgctttgctccctagatatccatccacccttccatctgcccatcattattgactgcctgttatgcactaggcctatatccatgcatctctctgtccaaccatctgtgtgtccatctatcctgctggctgcccgttatgtactagacactattccttccttctatccatcctcagtgtcttcatcttctgtccatccagcattattggttgcctattatgtgtcaggcactgttctcggccctgggtaccctgagtaggaaataatttagctgggaagacaggctcatgagcaagattgttttattgttttctggtttggatgtgaggctactaatgactgacttatatactctcacttgtaatgccatgaaggcacagcctgtctactttttacttactgttgtctctccagtgacttattaccaggaatgtaggtccacaatacatagatttttgaatgaataacaataaatgagtggtctttatggcatagtctactcctttaagaggtgtataatcgcggctgtgagaagtcacacagcagacagacctcatttctggaccaagtaatgaagagtgagggacgtctctttatgttattgtgttcgccatctgtttgctcctgtggacaaagctgaagtgagcactgggctgtgggtggtgtacgagactgacctggtccctgtcttcttggagctgcccatactgagcaagtgtgaaaagtgttgggagaaacccaggagctgtgggcacacagtgggggccagcctgggccatgtgcgtgaagccacaccttgaaagaggttcctggagggccaggtggcagtcggttggttgtgttggtcagggtgggagaggcctttcgggccaaggaggatgtatgagggtgctgatctgaggacacctatcttggaagatcgctgtttggccagtgggagggtgactctgaagtgaggctgaacagaccacccacagtgttgaaagagcaaggtttccttttttcgttgtggcagaacccctaggttttggtaacaatatgactttaaggcccaggctccctaaggagggaggtgtattagcctctttaggctgacatcacaaattacagccaggcctctatatctgtgggttctgcatccatgagttcagtcaactgcggatggagaatatttattgcatcagtactgaacatgtacagacttttttttcttttttctactctcaagcaatacagtataacaacgatttacatagcatttacattgtattaggtattgtaagtaatctagagatgatttaaagtatacagaaggatgtttgtaggttatatgcaaatactatgccattttatatcagatacttgagcatccatggattttgttatctgtggggagtcctggaactagtccccatggatcccgagggacaactgtaccatgaactgggtggcataaaacaacagaaatgtgttttctcacagttctggaggccagaaatctgaaatcagagtgtcaacagggccatattcttttggaaggctctagggaagaatcattcctggcctcttcctggctttccttggtgttccttggcatgtagctgtgtcacttcagtttctccctccatcttcacagggccttcttccctgggtgtgtgtgtgtgtcctcacttcttcttacaaggacactagtcattggatttaggacccgtcctagtcctatatgacctcattttaactagttacatctacaaagaccccatttccaaataaagtcacattctgaggttccgggtagacatcaattttgagggtactatccactacaggaggggatattgaagtgggtggacctgtgctaggaggcttcctccaagtcttttcattcttcaagattcctgggttgatgggcacagtgaggctgcttgggggagggtgggccagcagctgctaggattcctgtctctgctgagggctcctgggtacaaggttcttctcaggtgcccaagagaagctgtgtgactgagagaggtggccctgctcatgcatgcctctggctcagggtcacctcgtccctcctgcagcaagggaagcatgtcagggtttctttctcactgtcctaggagcaccttgatataggaggaagtgtctgtgaataaatagctaaaataattaatgaccctagcaaacaatggcttagggtttttccacggttcttctctcctctgggaacagtttcctgctgctttcttggaggtgtgttgccagggactttccgggtcttcgggacatcactttccttttctttcttgtttctctgcttgctcaggtttagtgctattagcttcttccatttctctggtatttaaatattacctgcagtgtctttctgtaacagtggtttttaaacttattgtgcataggaatcatccggagagtttattttaaaaaggcatactttcagatgtattttccagaatttctgatcccataagtctggggcagttggattcaggtgaaattcaaaagccaaatcaagaaacacgtctccaaagagagagggagagggagagagaaggaatgagagagagagagagaatctgtgtgtgtgtgtgtgtgtgtgtgtgtgtgtgtgagagagagagagagagggagtgtgtgtgtgtgtgtgttgcaggcatgctttccctcaagtgatatacctgatgtattagaagggatggtttttgtatttacctgatgttaattggcacggtttgtcactagtttatttaaaattctggcctagatacactgtttagatacacacatgcaaattcttcttttatcatttgcctagtggcaaagtggttttaaaataatatcagtggtaccttgaaaacattataggcatcttgttggctaaggaagaaagtgagtggggaatggaaatgggtgttttatggcttcaagactaagcctaggaaatggtgttctgattgttttgtgtgtcgtgaaggagtgagtaatgggatggctgttttgtctacatttctgggacttaacattccctttttagaaaaaggggattgcagggtttatcattcttctgaccgaactcttaaaaaaggttacattcttatttgcttgcttatttatttatttagaaacattattgggggcttctggcgtgctagaattgtgatgactatccttttatgaacaaaacagtcacggctactgcctgcctggggtttataatgtcatcggagctgttcacattaaacagtcaccacactcaaagagattaccaattgaagggataagaaagggaattctggggagctatgagagtgtacccctggggtggatagggaatgcgaggagactgcttccctgaggaagtgacccttcatggagaatctaatgggctaaggggcagtaactaggtggggagacaggggagtgtttcagaaagagggcacaggacaagtgctaggctttgtggccggatggattgcggcacctttgattatctgcaagttggccagtggggctgggtatggagtgagggcaaggccagtggggtgtgcagacgaggtagattttgtagaccttggttggatttattttgagtggggtgggaagagttataatcagggagggtatggaagggaccatcaacaagatcaggtctgccttttgaataggttgttctgggcagctgagtgacaaatggactgggaagcatcaggagggaagcggggaggccaattaggagtccaggccagagatgatggtggcatggacccaagtctttctcagggtaccagttggaggagaggagagctaattgaggttgtaaagcaatcccagggtattcccgtgcccaggactgggtacttaatctgtggggctccttttcaaaaagcagacataagtactgttaaaagcattaaaatagaaagctgttttctttcttttctggtttctttcctgatgtgtggtggtatttttaatctgcccatgttcttctaaaaaggaagaattaaaattttaaattattagtatgaactcttctgttcatctttatattgtacaatgccaattttcaataagatcatctgacttatatgcagaatcactagaattatacaatccatatttcatagctcatatgcatttatttcattcttccaagaacagtggaaatgttgcacaaaatcagttttcatttttcttcttgatgcatgcacattttcccagtgtgctccaccttcagcgtacgatgtgtgaggagggcctgaaaggaaaggaactatgggttgcccagtctgtctctgtcctaggttaccatgatcagtgtcagtggttggcttatccagggaaataacatgaggaagaaggctatgatagggttcctgggccgttcatgtttctttggatgccattgtctcattgtcatcttcttgcatctggcaagttctggttgaaatggtaggtgtaacccctcagggctgtcagcgttcccccttactcagtcgtagatataagacacttaccttgcacttactttgagtctcactgagctcccacacatggtgggtccaccagaattctgtgcactggggccacaaggagccccagtgcgcccgcatgacatcccggttgttgttcctgtctcctctgcgcacacatgctccactgtcgcactggatctcacttgcaaaacacaagttcaaagataaaattattaaaaatttcaagacagctacagcagagcattaagccaagcaggcccttctgagcatgggaccctgtgcatctgtactggttgaatgcccatgaagccgccctgcctataccttaggcacttggaattttcagctgccctgtgagcctgttttctggattcacttgagtctgtatgtcaggtttaatatttgcaggctcagagaagattagctgggcagagcctgtattggcagctccagcctaggactgtagtccaagagtgcttggctctccagctgcctcttctgtgggaagcctggtttccggattggtttctgggcagtcagcaccagggccattcatcagctccaggtgccatgagctgggtttctacaaaacaaagatgtgttcccagtcagttgtgtaggcttcagaataaggagacatgattgagaacatgttttgaagaagactcaggcttcagaatttgtgatttttaaattgaattaggatgtttcctcctcccacccctgctgtcacctagctttcttctaccacgagcattaattgcctgctttgggaacatttgtaaacccactgtcatgatttagaagatccggcttgctctgtggagctccacctttgtcatctggaggggttccattactggtacttagtattagatgttctgaagggttaggtggtatcagctctcaaacttcagcatggataagaactgcctgggaagcccaggctcctaggcctcagccctagagattttgattgagggtgggctccctggaagggctcttgcaacacctattgcaagcggtgttcagacacgttttgagaaacacttatctttggcctctctcattctgtggtggtctgcagtggcaaggggtactccttgctggagcatgagttcctgcctggactggaatccaggctggagaggagacggtgcagagtggggaggcggggagcctggggatttcgtgggcacctatgaggagggtaagtgtttgcccactcaggcttccgttcttggtccctggagcacagcctcccctgaggtatagcagaaaagtgactaattaaagaggggataaaagaaagtgaaaccaatttctgggaatgttattaggtgtggctttgttcagaatggctaggtccgttttttttttttcttttttcttccagaaacatgaatttcatccagggggagatgagcggatttttgttttttaactgaatttattctgatgcttaggagttgccaccttgcttcctgtggtattagtggcaaggagtgtctgagctgtgtccagggatcaggtggattcagttttgatcctaattatgctgtgtggactgacggtgaggagggcgagagggagtcaaagtggtaggggccgggtggcttcattgtcctttcatttttacgcagaaacaaatcagcctggcatgttatttattaaatatatatgtaaatgattctaatacctatggtttattgagtgtttgctgccggccaggccctgtgctaagcacttcagtgcatcatctctcttctcacaggagcctcaggaggcaggtttccctttagtgccttttcacacaggtggaaattgagtaccttgtaaatgggtgagatgggattttgaacgctgggagtctgttaaccacaaatctaagcttatttggctggatgaaggcctcgatttacccaccataccttgtttttctcttgattgccctcaaattcacgttagctgttggtaggaacagtgcaggggtttctgatccttgtgtatggctccaggttctgccgtctgtgactttccgaattcacaactgttgaatgccagtgaaactctgattctttgggcttggttatgggttggcttgtttgttgttcctttttttctttttgttctttgctagagaaagctagaaagctcagggattacagggaggtgacaggccttggcttctcttttcctgcttttcaagtgaggttcttgcttgcccaaatttgttcagggcaaatgtgattgcatggaccctggaagaggcaggcctaaggatgtggaaagacagtaagttgtagaacttatagacgttgagttttccattcacagttctaactccagtcagaaaaccttgtaacagaaagatttgcatcctgtgatgacctgtggagaaattaatttggctggaaatgtattatcagccctaatttgttattttgaagttgtcctctttttcatttaaaagttttacaattattttggtaaatatttctgcagacttttctgaggtagcagtattttccttttgtaatatgtatgaagaaaggcatagaacaaggataaaatggcagtcttttgataactccctggtagaagtggtggtactcagatttctaactgtttaaccaagttctgggttctgtctgggtgcgtgggccctgactgtgtgaacctggagaggcagagcagtccttcccaatttcctcatctgcttgacttctctggctctttgtcctgaattccatttattggcaaggcctttcttttacttataaacctcttccaagaaggtctggctttcactgtaagtttacgacgataaattttcagatggtacacgtcaccctcttaatctaattgagccagcacatcattgtgaagacatcatttcatttggggagtattagttgctatggttatttgctgagactaacagagtctgtgttctctcaattggatttttggaaactgctctttgagaatgacatagaggtgtgccttgctgtaggaatatccagtatataacctcaccattaaaaataaaaggcacagaaaagatactttgggagggatcttagagctacggaaaggggttggctccttggttttcaagtgaggttttttttttttttttctttttgagaaggagtcttgctctgtcacacaggctggagtgctatggcacgatctcggctcactgcaagccccgcctcctgggttcaagcgattctcctgcctcagcctcccgagtagctgtgattacaggtgcccaccaccaagcccagctaatttttgtattagccagagacagggtttcactgtgttggccaggctggtcttgaactcctgacctcgtgatccgcccacctcggcctcccagagtgctgggattacaggcgtgagccactgcgcccggcctcaagtgagttcttttaaggccgagtgtgtcacataactctccctaggttcacatgtatagttggtggctgcacaaggagacacgccatttctggttctttttctgggttcttttctattctgtctgcaacagcttaagttctctcaaggaatttattcattcattcctccaatatatattgaggtcctgtatgttccaggcacgtgctaggagaataaagaagctgtgatcttctctgtcagggtcttgagtgggagtccaaacccttgccttggagggtgtggtgcctggatcagcaccattggcttcacctgggaattagaaatgtagactctcgggctcccaggcctgctggatcacatgggaattttgacaagatcccaggtgattgggtgcaccttaaagcttgagtagctgtctctgctgcagaggaaaaggcattccagaaacaaaatctaagtcttgaggctcaagccaggatcaaccctcccagccccactgcctcctatctgcgcacctgcttggtgttgagcagaacagaactgctgaggtgttgagagagaggaatccctgctccacctgcccctccccaccattcttagacctctatctccctctatctccacccaccagcccctaccggtttttccagccctagtctgacccagtgagtgggtctgacttgtgtggtctcctcttaattcaccaccccctcccctttctagaaacgtgtctaccttaggggccaagctcaagttccaccttctgaggaagcccagtacttcaggcctgtgaacgctgtcagtctcttgtgtcttaaatgtcgtcttaacacactcattcttttatctgtttcatctggggctggcctgcctccccaggcagtggacagaaaggatttgatgatagcactgtttccccggtgcatttaaaaggcacgacttgagcttaataaacttcacaaaaagaaacccatactgctttgagttcgtttagttaaaaattggtttagttaaaaaatggtccatccgggttttgccttgcctttcatctgccagaggtgaaaggaaattgtaaatttgtagaagcattaggggttttctgagcactgaagaaaacccttaggaactcaggtgtgtttttagtagttcacaagaatggggttgatctggtgactcaatgaggcaaaaattgcttaattgttatggtaattaagattctcctttggttgattctcctttctccaacctgctggtaaacttccactccacctctgctgtgggaaggaaagcaaggcagggccgggggcatccctgtcctctctcttccagaacatgtgtctttcctattttgaattcccacaacagccctgtgaggtacatactgtcctcacagttacatacatgcttggaaaggttgggtaatttgccaaaggccacacagctgggaagtgagagaccgggatttaagctgatgtttgcgcagccaatgcgcgtcatacgcctctgaattaccttccccttgccccgtgtgtgtgtgatatttgtacttgagctgcctggaattaccctctcttttttgttccctcacttgattagtccctctcaaaatgggtttctttgttttcattaagaaatgtccacagtcttccttgagggagtttttcctgtggtgaccttctgctgtcttatcatgtcttggggcagcatgtgaatgcagttgttctaaatacagtacctcagttctctgtgccagggctgagctggggctgggctctttaggggttgagttttcatcggagatccaatgctgactaactcacttgacacagcggtcattgatccagtaaatgtttattaagcacctactatgtgacttgcactgtcattaagccagtccttaatttcttcatctagaagaggtcaggtgctttcacttaactctcaatgttcttatgaggaaaagccaatacagcactttggaaatacatatgtatttgtatacattatttgcatacagttatgtataagtcgtagtgggcccagaacttggagttttcaacacggagaagtttttttttttttttttttttttgaatcccttataactctttccttatctcctggctgaccaatggtctgtgcacaaatgtccaagttgagaggtgttgcctgtcatttagttacctacagggagaatgccccttggctgtggttgcacattctcatagtgaagcttgctggaggagttacagtaggtgtctccaacaaagttctgggccagctccttagtaaaaggcttaattgttgtttaagttgatcttgttgctcctctgtataacaatccagttcccatttctttaagggagtaagttcaaattccttagcttggcatacaggtccttccatggtttgattctaaccggtcttcccactctgacctcctgtccatctagttaaacttgctgctttttctgggtaggttctgcatttcgcatctccttgctccatgtttccacttctatagcatcttcccatgactgcttccgcttcccttttctacatatccaaataggactgaactttaaggttcagctcaaacgctactccctgttctttttcttttttctttttttttttttggaagccccctccaatggccctagccggaataatatcccacttgcatttctgtagccatttttgtctactctctgattgccctagcacagtctaccttaattttgtagttttgcacacacagattaggcccttctaaaaattgtattccccttaaggcacggaatgtatacataccatcttttcatttctttgaatacattgataccagattctcaaatatttgagtaaatgaggcaatatagtgtagtagttaagagttttggagtcagagagaccaagtttcttacattaccactcattccctgcatgatcttgggcacgttatttaacctctctgagcctcagtttcccatctgcaaaatggaggtaataatatctactcaacagaatggttgtgaggatggagggatttaaagtacttggtaggtacagtattcagtaagttaatgtatataatatattcatagttatttggatgtagattaaggtgagtttgggtagcccaaattatttttaaggggtatttcatctaaatagaattagaaacctcattttggaaagaggagcacgtctttattctacttgatttcattttaaaaatcaactctgaaaatttcattagccttagtgctctggttggaaaaacaaattttccagaatcagtgctggtgatggcctcatttaggaaatgctgttttagggaaatggcctcaggaaaagcacgcagatgtatgatcagaatgcatgttatgtaacgtaccgtggctgatgtggtcggtgggcacatcatccgcctgggggagataagaggttttctgaatctgctccagccagatctgaaagaatgtgagagacactgtggtggtgacttcatccctatacccctcccactccatgtctcaggcttgacttgctgtatgagagcacaggccctccgaatgtgttagagcacttcttccaatgtggaagccagggcccctctctcagttgctgagtgtccactggacatttctaggtggttatttgttcctcagtgggacaggatctgttctcagcactgcctttaaggctggccctgtcatttctccttgagtcttagctgttgtttaaattagctgcttggtcaaggtgttctctgatatagttgattgccacctagtggccacaggtaagaccgtgtgtcacggaaacgagaaaaatgctatggagaattttgtttcattctaagatttgcacagggtgtgtgtgtgtgtgtgtgtgtgtgtgtgtgtgtgtgtgttttgtttgtttttgctagtacaatgccaggagtctgggctgcagaatggtatttacaagggactgtaacttgcttttcttataatgaagcacatcgaactaggtttaaactgctacatacagacttggggaaatggggagtcgttggaaatgcctctctccaagcacagtttctgattggatatgttctcagttttcccagatacggggagaaagaaaagagcgatctctggggactcttccttaaaccattttaactgcaacctggggcttgtgctggggctaagagaggacagttggttgtggccagcagttgggttgtatgtagctcatttctccagcttccttggtataggtgaggttttattttatgctcctgctggtggtagctctccctccagctctgtgggactcttcctcaatggacaacatgaagggaggtggtcacatgctaataggaagcacattcccacatatatatcaggctctagccagacttacataagttggagagtttgtcctaacttacctgctttttttttcacatgtcaaacattgagttgggaggttcacctctgatgaaggctaatggacttatggagtgcccaacttcctctctctttgttctttctgcaatacctgctctcagtcaagcagtagagtgttgggctttggggatagagtggtgagcatgaagggatatgatcctcatccttatagaatgtactagttggggaggcattacttgaagagaagaattacctgaacaaatataaaattgctctgaagaaaagatctatagtatagtactcagagagtgagaaatagggttgggtttggcctgattagagaagtcagggaaggcttcctggaggaaagaacttttgggccaagggctgcaggcagaggtggcatgtggtggcaggtaggagttgggcatgccccgggaactggcagaggctggagcagctggagcccagagaggggtgtggggaggccagaccctgcagggcctctcaggccttgggagggactttcgtcttcacctccagagctctgggaagccatcacagggctcactgctggtattgacacaactgggtggagaactgatttgacggacaaaagtggatgtggggaggccagagaggagcagttgcagttatctgggcaaatggaggtgttttgtttaggggttgctgatagtgatgggaaggagtgggcagaattgagatgtgcttaggagacttgggaatggacatggcacatgagggagcctgctgtgtgagaggatgacatgtactggtgacttgtgcggcagggtgaatggtggtgcccttcgttacactggggatgcaggaagaggccctcggctggctctctggggagagggtggcagagggtgtttgagtagagagagttttgttttgagtgtgttgagtttgacctaggaatgggggtgtgggctaaacctgaagtctctctggggctcgtgtccatccatgtctcagctgtctgtcatgggtcctctctggagactctcaggtattccacctgtaagccagcttgtgtttccttgcccgctcacatcgtacaacaggtttggagggacactgtgtccagccctgtccgaggcactctttgtgcattgtgacatgaagccattcatgactagttccagaattattccaaatacaaggtgatgaggcacagagagtaactggcgtccaggaaaggaagagattaacaaggcccggggactttggtattcttgaactttaggcagccatgaggccaatcctgttgcaagttctaacctcaatgatggcctttctgagctgtaatcactttcttttcttttctttttctttttcttttttcttttttttttttttttgagacagcgtctcacactgtcgcctaggctggagtgcaatggtgcaacctcggctcactgcagcctcagcctcccgggttcacgcgattctcctgcctcagcctccctgagtagctgggattacaggtgcacaccagtacacccggctattttattttatttttttttgtatttttagtagagatgaggtttcactatgttggccagactggtctcgaactcctgacctcatgatccacccgccttggcctcccggaactgtaatcactttctaagtccaaagggaaagatgtgactgagcagcaaaacatttcaagggtagttaatacacaattttggtaactttggaggtcacaaaggcaatagatgcactgaaaatacagtagtaaggttacctgagtccatgtttgtgtgtgcacatgtatgttaagttttacccaaggagaaaaaggaaatggcttgacttgtggtattactggtacaacttgtataaaattaaggtagattctaatttttaaaaaattatggtaaaccttctgtgttagtgaaagttggatctatttgggttaaattctcttaaatccggtgcagattaatatctgctggcatctccaagaaaagaagggcacttcctctagtccctgagtgagcaggtggctctgggagcagtctctcaaggcccaaacttctagctgcttccatatttcttagccatctggtcccctcactcagagaagcacagccctacctactctggaaagcagatacttggcctccccagatgccggcagttatgacttccctccactctggccagcattctgcttttctagcaacagatgtttctgcaaagtaaatattattgactctgcttggctccttgctgtgtcttgcactgcctgcacatgaaacagcagggttatatgaggagggtgccacgacgcttggcatgcacccagcaccagtgccagcctcttctcttttctctctcctcttattggaatgtgtgtgttagattcctgtgtgcatcagagggaaagctcttgaaataaatctttgggctgctccatatccaaggtgaaaatctacataagataccaccaatcttactggattgaaattggcaagaagcaatggtttttaggtagagagttctctttttagtgttgttttcaatctctcaagtaacatagagggtttaccttaatggggtgaagtggtatggtgttcccacatactacaaggatctcagttcacaggacttaagtcacaggtcctctccttagtggccttgcactcttaggtcagtcctttaacttctccgagctccaaacagttattcatgcttacctttcctggttcctcttactggaggattcatatatgaggaaagaatagcccagctatacctagaactgagtcttgtgatgtgcagagtgcctatacagtgtttctcactggatcctccctgcctaacccacgggctgacagcctccgtcagatgagataactgagactttatgactaacccagggttggttacatatctgatctatgttggagctggaacttgaacccaggagctgtgggattggggtgggggcaaggggttggggttgatcaccctgtcaccatcaccccatagaatgcaagtggagaagggaggttctccaaaacaagcttgagatgctgtcccaaagtctggggaatggattccaaacaagtaaaaggacaggtgtccactttagctgtactgaaaaattcctctatcaagcctgaggtgagttcctttttcaggtccattcatcaggattctcgctctacccagctttcctcattggcttgaagcccaatactgactccataccagcagtcattacctaatcgtctatcgggggatcggcctgtccttcagcttcatggggtcctcactgcttctcaggcttgcactgtggcagggtgtgctctgtgccagtggacaaggaaatcaggtcacctgctggtcataagctaacaggccctgccctggttcaatgggtgcccctgtgcagaagcctcacaaaggccccgttgtgcatgaccagccactccctgatcctcctggcagctgcccttggcagtgcggcttttcaggtgtgtgctgggagctttcccgagcctggcttgcatttcacctgtttccactttgttgagatgattgagtttctcttgcttatgggggaggcacaggattgtcgggtgggtagaaaggcaaacctgtgttactcttagtgcagactttgtgcgttctcatcagggaacattctgactaaaatgggaatgtgtataaccacacccacatttgatgcacacacatttggaggctctaacagaacattgtcttccactctaaaatattattctttcccttttttcttgtgtctacctgtagcctcctcctgccttcctgcccacggtgttctggcttttgggtgcatctgtttccttcctggcttgccttttgtgatttgtgttctgagggatagcctcagcctgggctggccatttttgtcagatgcctgagtcccctgccaacatcttttgacattttggtaaggaccattctgtgaaagtgactgaacgagggagagatcggagactgttggctcctgtgttccccttctccaccccaagtgccttcttttggtgtagagcagagcgctttggacaaaccgcagctatctcgggaccgtgtcatcacagcgtgtgggagggcagtccaggagcaggagctgcagctgctgtccatgcagtagcttgagccctggtcctgagaacagcagcacagcccacgcccagctcttccactagcagccattgcttggaaggagcactggggattggatttgtatccagtgcccccactcccaccgccccccacatttattcagcatacactgagcaggatgcactgccaggtacacagaggaaacaaaccaaaacaaacagaaaggtggaaaacacgatccctaacctcaggggacaaatctgggagctaagaaaaagtactgggagtcacggatgcttttattctagtagcttatgttgatctgtgcagccacagtacacccccccaccacccatatcttattaaagccaggccttgttgctggttctgcctcatgtttccctcccttgggcatttggacataatgccatttccccttcaatgagggaaccatgtatgagggtaatttgaatgattagcctaatctgcaggaagactgcacatggaattaagttaagcacatttgtcctcagcagccagatctgccagtccacttaaaggtaccttggtggtttcatacccttaagagatgttgaagactccggaaggatcactggctttcattactatcttcagtgaaagtttatgatgatgactttttaatgataagggctcttgagagtttttcttatggatactgcgtgtggcatgtgtttttaccctaatacaaaatgttgccggggctttgttctcctggtggtgttggatgtggccagccaggaaaattcaggtgagctttgtcaggctggtggtccactctgctcatgaggagagtggagagggttgtgagaacctgggcctcgcctgtgcttgagtcagaagaggaaggccaggtgctatgggcagggcagttcccagcccctccttccagccttctccaggctccctccctagtgaaagtttgtgttgtgagtaggacctaggggaaattactgttgagtcagacttgtgggggaaactgcactgactgtgtggagggtcagtggcagagcagacctgcaggctgtggacactaatgttggctctgatccaagctttctccccgacttcctttggcaagtggattcccacatgtcaaacggagatgacaagttgcctttagaaagtagagatagaacttaaattgttaaagccaatataacaaaaatattaacttctagaacaaatcagtgcttcatattgtaaccaagtgttgactattttgaatttatattcttttgtgctttgaaatggactcaggaacaaatccgcctcctaagatattcctagaaggaccaataagggcagcaaatcagaaagccagtttaattttagtaattcctgatttttcctgtctttttcttgctagatttgtcttcagcgaagcggaagtttgcagattccttaaatgaatttaaatttcagtgcataggagatgcagaaacagatgatgagatgtgtataggtaagtcataactgtgcagaagataaaaatgttcattgtttgtcatagccttcagtgtcccagcagagccttttccctgagataggaagtctctaaggttagtaaacaaagaagtccttagtggaagtggagggccagagatatgtgaggatcggagcttggggctactctggtcttctcgagttttgggattgcctcaccctccagcatgcaggagagaaagcttgaagttttgcagtgggactctcctttccacctccctttagtatttttccggctggtgacattcttccccttcaaccatagtactaagagcttagagcatatgtagaacacaggtagatgaggggaaatttagatcagaggttgcaaaataataggctgagatgagaacacagcccagttttctttggctctcattttttaaaattgaattaccatataaattcaatttataatctaaaattccagttttccagcttctttgaaaagtttgagaatttgatctactggctccctcttctgacctggcagcagttggctgagctatgcgtctgccactgccttcagatagggagaggagctccgtatctggttctcctgtgctgtggacagggaggtccccgccactcctgtttccttaaaaagaggctgaggtgggttactgtttatcaccacggtgtgttgcttcactcttcaccatcacctgccttggtctgtaggcagccgtaagcatggaggattcgcaatgtcaagacacctttctttgccagggccttgtcattgcacactattcttctataggcaccttggttgactccattaaatgagcgagaattgagaaagttttattggattaattaattcatcaaatgcttattgagttcctgttgccatgtagaacatcagcatctggggctgagtacaggcaattgggagacagctgagaatggtgaaaatgtatccttgtaacttgtgaatgtatggctgcttttcccaacatggctcaagggtctcgagtatcctcagggccattgcacgtaatgcttattgcttttatgaataattttggcaaagacgactgttcatgtatgagcaccatgcttcgagctgcattctattaatgagtggcttgaggactcaggaggaacccaaagagaagccagagatgtggcttccaatgccagcagcattgtttatttagctctggtgccaaagaaaaggctgggttctgacgcaacgccatgacaaaggttgaggaggtcgaatccagacaggaaatccttcaactcctaagcggaactctgccccttccagcccggggcctggaagcctgccagcatctcaccagtcctggatactctcaggaacaggcagatcttttccttgaagaaatcattccctagctagagtgccaggtggaattaacctgcatttctgggtcatccttaatggttaatgattaaaaagatgaagggagccttgggaagcaattgactttaggcatctgtatgtgccaaggaattaaaatccataacataatagccagagctggaaaggctccccaaggcccatgacactccttccacctcatggcccctttctgttttccagcaagatctttgcaggagtttgccactgtcctcaggaatcttgaagatgaacggatacggatggtgagtagggctgggctactcttggtcccagatagtatattcgtgttgagggagcaagggatgggtatcagaagaactagattcaaatccagactctgccatttgaatgttttgagctcttcagcaagcctcatctttgtagagtttgaaggcttttgtaaatattaaaggattactctggtggataactttagaacaacgtagttaaatgatgtccttctgaagattcattttaaggtcttttcataaggtgtatgacttaagggtggatcttttgaattatttcacttttttgggcgtcggattctctaccagcagaatgggaaagaaggtgccccactctgcccctccccccatcttattgaacctgatcaagagctctttgagggcaggatcacttccctcttcatttttaagcacccaacacagtgcctgccaggtaggagggacccagtaaacaggtactttgtaatgaaggtaactataaaaagctcttcagagaggcattgtccacatttaagagtcaaatgctgatctccaggttcttaagagatatcttttgtactagaatttattgttctggaagacagagagggtctcactctgtcacccaggctggagtgcagtggtaccatcatagctcactacagcttcaaactcctgggctcaagcgatcctcctgcttcagcctcctgagtagctaggactataggtgtgcaccactgtgcctagctaatttatttttgttttttgtagagatgaggtcttgctgtgttacccaggctgatctcgaactccaaaccttaagtgatcctcctgccttgcctctcaaaatgctgggattacaggcatgagcaaccctgcctataatttattctgatatagttcagcattagcagataagagattccacatctacaggaagttcctttgcatttttctccatatccctaagatatgaggaatgaagtcccctgctgacttgaagtcccctgctgcctgtacactgattttctgctaggagggcgtgtcttcaggcagcagtgctctaaagtcctaggaaatactgcatcaatcaacattttcttttcttcccatgctaacagttggtagttcgaacactattcaccaagatgcattttctattttaacccccatgatgactctgggaagtggtatctatattatcgccatttttcagatgaagatattgaggtttacagaggttaagtaacttgtcacagatcacacagttaataagtgatacagtctgggttcaaacccaagtctgcattatattaaaaaatattaaaaaatgtgggggccaggtgtggtggctcatgcctgtaatcccagcaccttgggatgccgaggtgagaggatcgcttgagcctgggagttcaagaccagtctggaggcaacatagtgagaccccatctcaacaaatttttttttttaagaagactggcattgtgacgtatgcttgtagtcccagctacttgggaggagggaggaggatcgcttgtgccagggaggtcaaggctgcagtgatctgtgattgaaccattgcactccagcctgggcaacagagcaagaccctgtgtcaaaaaaaaaaaaaaaaaaaaaaaaaaggatttctttaaaactccaaacagagtagaaacctcttaccttttgccctacggaaagaccactttctcttgattgctcactgctggtgcctgaaccagaatcagaagggtggtggtggcagcagtgggggttggtggtgggtggaagcaagggaaagcttgtgtgtttgtgcatgtgctggtgcctaagaaagggaaatgattcttttgagtctgattcttggctgagttagtatttgggggtgggggtgtggcaagcaaatcaccatgaataccctgcagattgctatggcctgtggtaagggaacaatgactggattatacttttcagcttgcctctgcaattttattattaatgtcagtgaattgagtttctactgtctgcatctgagtatctggccgtagcaagccccttctctacctccttgccctgtgacaactccatcagttcagttaagctcagcaagcaaagccgcaccttctctgggaagcgtttcctgacttcctgggttatatggctacccttggtattttcttaacatccagttcgtgcttctgatcctgtgtttaccacattgtgtcctgataaacattgtacctgtctgtgccctgtagtaaatatgagttcctcaagggcagagactgggcttccatgtccccaacatcaggcagtgttggaaccaagtggatgttacacagtcgtagaatcttagactaagtgggaccttattcctcaccatctgcaattgctcatttgacagatgagaaaacaggtcttattaaggctgatagcaagtagtagtatggctgggcgaaggacttgggggtcctgattcccaggtgagcagttgagcactttcgttttataagcgactacttatgactgcattctcaatcatggatgtccactggaataacttggggagtttgaaaaatactgatgtctgggactaagtccagggattctgagttagttggagtgtagcctaaacttagggattttaaaagctttccaggtgattctactgtgtagttaaggttgagaatcattgactttaggggcttggcacacctttgtaagcttcagagacttgcagatggtttgtggagaagacttcagtgaaccaattaagtaacattgaataacaataaaaatcacaaaatcaaacaaattaacaccgcaacactctagtcttaaatttcactcttctgaaataagtgatctccaaattgagaaaaaggcaaatgggaataaatttggagacttgactttttctgtcccttacattgttcagttagttctttactgtgtccatctgtgacttctggcatttacccggttagtttcattgcagtggacatgcatgtggtttaggaaaaataatgctttgttgcagcgagattcctggaataattagttgagcgaagagtgataaatgaatgacttaaaaggaaaaactgtaaaatattgtactgccttagaaaagaccatagaatcttagcgatggacaattcagcccactcgttttgcagatgacgaaattagagcccagagaggttaaatgttttgcccatggtcacacagttggcagccaatcaagaattaatccattcattcatttagtcgttcaaatatgtttgagtgctgctttgtctcagcactcttctttgttttggggatagtggtggcaaagtgagcctttacaagatactgatgtgtatgtgtgtgtgtgtgcacgcatgtgtgtgtgtgtgtataaatgtgtagtgtgtagtggtgaaccagaacacacttggtaggggagggaagttgagttatgttggtagtcagggaaggcctccctaaagaggtgacctttaagctgaaatcttaattacatgaaggagctgtccctgtaagggtttgggaacacagtgtctgaaagaatagccaaatgctacggccctgaggtgggacgagtttggtgcgtttgaggtgcattggagtgccagtaggttggaatgcaggacctgaggggtgagccctgtgagatgaagttgagaggcagccagtagtcaggaggcacaggtgtcctggctctagtccagtcctgtcttggtagagcaacacaaaatcaagcttggaaggtttttatgccatcagatgtccagaggtgtttctttgtttatttgtttttaacctagactcagtgttgatctactttacccataacttgggtaaatgaatatttgcaagaaaatgtcaccgaagcttgtaacttagaccccactcttttaccagttcccctctgccccttcagaggatcgcttacagttttagagttcctcatttttacttttaaataatcagtattaatcatgcatgggaggaagattatcatgttttgaaatgatgacagttttgatttgacatgctattagttcgaaggttgtaaacagttgacatgtacaacactgcctccccaaattttattttaagacatggggaggcatctcatgctggagctgctgtaattctttactgatactgcttttgtgtcttctttcccttactctgttgttcttcaccagattgagaatgccagcgaggtgctcatcactcccttggagaagtttcgaaaggaacagatcggggctgccaaggtgagaattttgcaagctttggtctggattttagggtgagaggtctggaaaacatagcacctttctttaaaacaaagtcttcagaaatgtcttcagaaaatcgaagcccaccttcttcagaaaatcttaggcagaaaactctatagagcccaactcatcggttctttacgggtgactgaagtacgaccatctgagccgtcaaccccggaggggccattctggtattttgttacctcattgttctgtgcttgttcataaatcatccaaaggtagaaaccacacctcatttgtgttattataatagatagctgtgtgcttagacaattgtctttattgaacaatacatttgttttcgtggaattgtattttgtggaggtccaggacttgcagcctaagcaggggttacaaatttgtgccctgtgggtacagggactttctttaaaaggaggcagctggtacttaggtttagctgatttttgttgggtctggaaatgggccctctcttgctgattctttaaatgtttcaagacaaactgaaaagccagttttatgtgaaatttcttgttggcaaataattttaaaatatatattacccattgtgcaggtcaaaaaatgacatctgcaggcctgcttcaacctggagatcaccgtttgttatcactgacctggagggactgtagcctaagcttgactaattctaatgtgttcttgagagactgcaaagggaatcctgttcctttttaaaaggtggattctccagggctcctttgccctgtaataaatcactaggagggctgggcgcagtggctcatgcctgtaatcccagcactttgggaggcctaggtgggcagatcacgaggtcaggagttcgagaccaggctggccaatatggcgaaaccccgtctctactaaaatagaaaaattagctgggcatggtggtgggtgcctgtagttcccagctactcgggaggctgaggcaggagaatcgcttgaacccaggaggtggaggttgcagtgagccgagatcgcgccactgactgcagcctgggcaacagagcaagactccatgtccaaaaaaaaaaaaatcactaggaaactctagctggtttgaccttcggtagagtgttagaggctacctgcagagaagatgttttcattggaatcaatgaaagcaaaaagatttccaacgttttcttcctgtttttctggaactgtgagtcaattcagctgcggtctcttacgccacctgcaggggcttttgggcaacaccaccctcttactttgtgtggattttgcttagttgcaaaatgaggtattcctcacccctacaacacacacacccctgagtgcatctgctttctggaaatagatatgattagggcctgcaaaagatgatgtttagtcagggtctttcagagggatggttgattacagtttgaaagagggactgtggcaaagactttctcccagttttagagtattttctactaattttagtttacacatttatgaggaagtgggagctcactggtgctgtatcagagattaaggaatgtataatttacacaaagtcttattccactaagaattcatacagactgtgaaccagtccagtgatggcagttaataagccgtgagcgaatgctccctcagttcctggcagtgcaggccctgcccgcagggctcctcttggtggccttggggcctgtgcctccccactcttgaacatgcttggcagtggcttccgggggttatgcagagcttggagactgaggcagagcagagctgtttgttgagtcatcttttcagtagttacttctccttctgagcacagatgcctctctctctggcctcttctctcactggcttgagggttaccatggttaccaaggaggtgaggcaagagtctgagtgagctccctttgggcttgataccagtgatcttaatgataggaggagctactgtcccccggggcggcggctggggggtggtatagatggtgacatactagaataaaagaatttaagtagtcactcaccaaagcatgtttcccctcatgcatattctattctcctattcattaaaccatgaataattattgattattaaataacttttggatgatcactaaagaagaattgtgatgacatttgggtgatgtctcatccttccccatttgtcattttttcctcctggcatgtcctcctttgcatcactccacacacacatacatttatatcataacattatgtaaatttaagagacaacaaacaagcaaacaacagatccacttctaggcgacccagggagcagtctcaagaacatctcagagccagcaagtgctcttcagctggtttgggtattggccaagtggaggttctgaactctgtctgtgccatgctaaaattactttttcctcctcctccactctctggtgctgcttcggttgccataacagcctgttggagagtgcaccatgtgaaggctgccagggaggaagattcttgggcattcttatgctaatgtgctactctggagtagggcacgacccctggtgcttgacataaccatggccctaagtttctatttccaagtttgaggaaattattttttcctgtattagaggtacatttggaatgctggactctagaataagtataacagacataagagagtagcgtagagagtgggtctacagctagactgtctgaatccaaatctcacttctgccatttgcatgtagacttggggaggttactaaacctcttcatgcctgtttcctgatctctaaaatgggggtaataataaaacttgcctcgtagagttattatgaagaagaagtgagtgaactcctatcaaatgcttaaaacggtgtctgtcgtatagctacctgaacatgagaacaaggttggtcatgtagtcattcaatgttagtgattatattagatacacacagttcatttgtttaaaaaatatgtgagagcctgctctgtgccagcactgttctgtgccctgatatttggtggagaacaaggcaggcgtggttgctgtgctcatgaagtagctggggtgaaagacatcagacaaaaagatacaaataaatgtctaatttccaattgtagtaggttcttgggacggttaccttcatggcacacaggacatggaaagcaggtgtgttcttgataagaaggaggcaggtttaggtgatgagctcaccactgtcaccaccattgctgacatttattgagcactttccatgtggtaggcaccctgccaagcactgtatgtggtttatttcatttaaccctagaaatcctttgaggagggggtgttcttatttttattttgttatatggtccttgagctgaaagaagaaacccgagcaattatctaatcatcctcaatttatagttgaggaaattgagtcctggagagggatggtgatttgtttctagccagtccatattgagttgggaataaattttaggattctaactcaatccttgacttaactaccccacagtagactctctggaaggtgaaaaccatcttgtgtcctgagtaatggacacactctcccatcttaagaacattatctaagctgtagtacttttttgctgcagaggtcttattgctgttttctcaggacagaaacggcttccctttctccttatttttttctctaactttgggtgtcctcttaaacatggaatgtggaggcacaagttgccagaatgtcccagaatgccagtgactcatgttccctggccttttctcacctctggccagctggactgtctgggaccaggattctccttttggagttgctgataaggctggtgggagcggatacatgtgagcagcatttggagttggagccccagttcaaagttgctggtttcactaatggaaaagaattgcttgagtcaagtctcttgcctgtaccctcctcaaatttgaaggagtaatgtgtcctcaggctttttcttcatttgctgctaaatgtttaattgttcttgtatgtgaacagtcttttaagcaaaactcagattcatggaaatgagtatgtgtcagctaaaatggatatatggttattctgcccactctgtgagcatgtaccagaggagtggtattctgacatagcggagcttgttagggctccgggtgatggcttctggctccgagtgtcctgccccagggcatttgcacttgatggttctgctctagaaggctctactctgctccttctgtatttcacaggtaggtctcagctcacatctcccttccccaaatgatgcctttcctgggtgccctatctacagaatctctgtgactgcgccctgtttatttcctttgtagcacttgcagcagtctataattatgctgattatttgtttactggttaatcatggttctcctactagaacatttctaccgtgagggttgggaccatttttgtcttgtatttctggtgcctaaagtagagccttacacagagtggttgctgattataaatttgttaaaggaataaagagatgtgtctgagcttctttatttggccagaaaatattttttctcttctaggctttggagttgcagaaaaacatccctatgggttcaggctccacatgagtcaaaagcaggaataatgtacccaattagcaaatttgatcccgtttatcagccaagtgccaaccttcttccagcttccttgcctgctctccccgttggaatgtggaaggaaggcagactgcctgtgacaatctgtctcagctgtggtggagaacatgggctttggaggcacattgtcctaggctccaatcccagctctgtcactctccgtgacttttcacaagttcacctctttgggtccaagttttcttatcagtcaaatgggagatagaaatagaaccacagtgacccaatgattcagtggtggggagcagggattaattatggtaattatttttcattttgaagacaataatacggctaataatttcttaaagagaagagaaaaataactgttaccccattaccataactcaggtatttgcctataagtaaattcccacctcatctttgtccataggtagacacactctatgtaggatgcagcaagtttatataatgctgttttacttttctctctagttttccaatgactagttatgcttattggatgttccgtactttaattatgccaaacgctatccttggaagtgatgttgctgctgctgcttttatttttcttttgctagcataaatggtgccgtagtaaacaaatgtgtgtgaagataatattgttgttttgaattattcctcagcttaaagacctgcatgtgatattaagtgtcaagagatatttaggcttacataccaagaagtgtttttgggacagtattaaggctggatctagccttagtctagacttgtctcattcaagctgtgaggatatcttccttccttggtgttagcttcataggtacccccactgctgctgctccccagcccccaacccctggctgccttctggccttgaatatccttgtgagttagaaagtagaaatttctgtttcacaaagttcttagagggggaatcttggctttgccaccattagatattcgtatttacctcatttctggtcttgtcctggttggtgcctctctgctagacactcaaactcagggggctgttgatgggtggctgcaggatttaatgggcattacctgaaaagtaggagctgagtcgtcatctgtgttctgagcagaaggatcttgagagatggaggctgcttttattcctgcaacgtgttactctttttctttttctcttctctttttttgccaggaagccaaaaagaagtatgacaaagagacagaaaagtattgtggcatcttagaaaaacacttgaatttgtcttccaaaaagaaagaatctcagcttcaggaggtaagagactttattagtatcctgaataaagtgttcaatttgtacatgatgctgtggatatgtgctggttgctctttgctagaaaatcttagggttagaagggacctgggaagccaggagattgctcctgatccctcatccagtgcctgatgcctggactgcctttgtgtcctcccatcccaccccatcctttgtagccttcccgcctgtcaaggtggaagacactgctggccgagatgaccacctccttgttgggctgccctgattgctagatgtcttcatttcatactgacatttcttttcctgtttctctcacccttggccttaattctgccctctgttactttaccttttgacttcctgcctcttatcagtgatttgaaatgttagcatctcaaacactttggttatccttccttaatattgattttttcattatttcaaccagcacttgacattagttttctttctttttttattttaaagcagtgctttattgtcctgtatatattttgtgctttggtaatgttgtttcaagaaaatacattcttaaatttgcgcttggtttttctgggtttgcatggtgtcttttaaaaagtagttcacttggaaagaaaaatgatggagccatcgcagccgtggagctgtgaccatttttatttagttcatgaagattggcatgctaagggagtttatgcttcttggagatagggagtttcctagtggaacctcaaatttggctttaaaaatgtcatcttatttaactcaacagtttgcttgacctctgtcatatgtttgccaaaagaggctaccgtggcttccaggccggccctttttttaaaattttaattctttttgaacagataccatgccagtacttctgttaggtgaaagttcatatgaggacagtagagtcagaggttgaaaggttgaagtaactcaggagatggtggagttcaatcccctcccaaccacaattggttacacatcttgggataggaatgtggtgttctcagaactctttgctttgaaataagtatttaatccagtttttagagtagtgataaggaccattactcaacaacaatgacaactgtagcagcaacaaaggtttataatggactttgtagatcagttcttggccagccaataaacagcattgactatttggtgtgtgctttacaaagcagaaaatactaatttatccttgaagatcttgtgcctgagtagggaaaaagaaacaaaagcggaggaagtgcttcttgaagtggcatagctactcaggtaaatcttgtcaaatgtgattgaaaaacctaaaaaataaaaaaaaaaaatcttattttcacgagatacaaaggctatcccaacttgacatgaggatatgggcactatcccacagacacagataatccatgataaatttgggattccatttagaatctgtcttggtgccctgactttttagttattcttctggcatcacttggcatttaggatttggaaactaacttatatttaaagaaaagctttttggctgtgcttcacagtgaccaggtctgcccagctctccagtttctaagcaggtataaattatggattagatgactatgcatcattagtacagatattcagagtattcagagttgagcaggtgtgtggttattctagcacctactgaatctgggaggcccacagcacagttaccctgtaggcatggcattctctggaacaaaggtgcttctccaccagatccattctctccgtggtcaaatattgcagacttggtctggaatgagtccagcattttcttttagggctgtgaatgtcttctgaattaccacagtgtagggaccagaacgctgggctggcaaagaggataccttgcctcaaaaccttctctgctgtgtatttactctgtgacctagggcaaattacttagattctctaagctttatttcctttatttgttaaatactcatgaaatatctgtcctacttatgttatacatgagaaggcaaatataactgctgctcaagtatgaagtatatttaatataaaatgtgtaaatatccttatgattggcctgttccgctccattttctgttctcaaattggatgccactattcctgactttgacagttctgtatttcagtggatgttttccattatgctcttttattatagtcctttatgttcttgcctttgacctagtcacactttctaagtactttgagtgtaaggattgggttccagatcttgcaggttctggtctgttcaggtcagttctcaggcattgctttttagttgtaactgaactaaattaaactgtataaaaatctaacactaaagaggtaaagagatcgagaccatcctggccaacatggtgagacctcgtctctactaaaaatacaaaaattagctgggcatggtggtgggtgcctgtagtcccagctactcaggaggctgaggcaggagaattacttgaaccagggaggcggaggttgcagtgagccacagtcgcgccactgcactccagcctgggcgacagagtgagactctttctcaaaaaaaaccaaaaaccaaacatcaaaaaacaaacaaaaaaaagaacagtgatgatattactactgccactaaccacatcaatagcaactataatatagggaaacatttgttgaatgcatatttatggcctgggtatggtgttaagcactttacatggaatcttctggaatcctcaccctaagaggtatagatgtggttactactctgttttacacatgaggaaactgaggctcagataggataaatagcttagtggtagcgagttaactccagcactggctgtgcagccctttcccttcacccagtttgcttttctacgtctctatctggggagggatgttgaggctctcttgcctgctgaccatgttatttagtgccagtgtcatgatatagaattagagagagggaaggaccttagtgatcatccatttcaactttcttgaattacgttttatgagggaactgagtttctcgtaggggtcaggtgttttgctcaaggtgttcagctatgtattgatcattttcttcacatttattaaaaattcaacttttaggaacattgttgagcacgtggtacacctttgatgaaaccttccactctgattatccagagttgttccctgattgcagggttctgcacggaatgcttttaaattccagcccatccctagatccctggaagtagaaactacagggcagtgatgtggaatggcactgccatctagtggatgatttaaacaaatgcatagtttttgaatggtaaaaaagctcgcctcaaaaacagtagtcattgattcaacaaatactcactggacgcttctgtaaaagtctgtccaggcactgggtgttttgtagaaagtgaaatgaaggatcttctttcatggaaattacaatctaggaggaagtctcttttccaagaaacgcagaatggttgacgggtttaatcaagccggtagatttatagcttctcaagtggcaggcagggaaactgtcttgagcggtctgcagggtgggttgggatcctggcttataattccattgcagggggcccaaggatgtgatggattctgtggcccacaccattctggggcattggcaagagaagcataacattccgcttaggatttcttcttccttttcctttgggaatgcattgagttatgcatttgttcttagttctgggtcactgatgggacatgcctttggtgctgactgatggccacatggggatcaattcattcattctgcatgcatctgttgaacgtttattatgggccatacaccgttctgagcactggaggagaaaaatgaaaaaattagacgaggtctttgttctcatggactttatattctagtagtctagtaggccaggcacggtggctcatgcctgtaatcccagcactttggtaggccaaggcgggtggatcacttgaggtcaagagtttgagaccagcctggccaacaaggcgaaaccctgtctctagtgaaaatgcaaaaaaaaaattagctagatgtggtggcacgcgcctgtaatcccagctacttgggaggctgaggcaggagaatcacttgaacccaggaggcggagtttgcagtgagctgagatcatgccactccactccagcctgggcaacagagcgagactctgtctcaagaaaggaatagataagagtttaaattgggagatgagacagagatttcctggtaacctatttaaaataacatagtcaatgaaagcctctcctaaagaggtaacatttaaactgagcccagaaggaatgagctaatgaaaggccaggacaatcttcttcaggttgtgagtgtgtcgcaaaatcacagtttttgggttatgcaatagggtaggctaaaatagaatgaaaaatacaaggcctggcgcggtggctcatgcctggaatctcagcactttgggaggctgaggtggacagatcacctgaggtctggagttcgagaccagcctgaccaacgtggagaaacccccatctctattaaaaatacaaaattggccgggcatggtggtgcatgcctgtaatcccagctacttgggaaggctgaggcaggagaatatcttgaacctgggaggcggaggttgcggtgagccgaattcgcgccattgtactccagcctgggtaacaagagcgaaactccgtcttaaaaaaaaaaaaaaaatatatatatatatatatatatatatatatatatatatatatatatgaaagtgcattgcatttaaccattataaatgtgtgtttattgagtcataatataaaaagtatttcttactctatgttgaagttaaaatgtgtgtttatctaggagaagaggtttttgggcagaatgaacaccaggtgaaaaggttgtgggaaagaaagcggtttggagtgttagaggacaggaaggagatccagcagttactcatgtcaccatgctggagcatggtgacagtgggttaggatgggaggaggtgaggctggagggttgggcagattattacacagggtcttgcagaccatggtagaggccatgagaagtccttgaaggggaccatgagaccatctgatttagattttaaggaagatattctggctcctgtgtgcagagtggattggggcagagggagagaatgaagacagagagaccagttaggagagaagtgtagtagcccagagatgatgtggctggtttagggtagagcaggaagtgagacccctgtgttctgaagtgcctggtgacagcaaccaccgacatgcacgggacactttccagttttcaaatggtttacatcatttggcccattttctcttggaaacactctactcagaagcaagggctgatattatctccatcttctaaagaagatcaatgacttgagcaggtctcaccagctaggacattgtagcattggagcttgcacttgggcagctctctgatgtgggagtcaattctgttttccttatagggatttccttctggatccttcttctctgcctttgcagattttcagaatgatttctcctgttttccccctccacttgcagtgtcagttggcaagcccaggcagagagaagctttgaggtgtgtggggtggttgggagtagatgcatctctccgtgtaagcgtgttggatttgcgctacaagaagatcaaaggctacaggaacacatggggcttagccgcaggagcccagttggaaggcgtatcagcccagttgtctaagcagccacacgatgcagggggtggtggtggtgagaagcaggaccttctgaaacctgtctccaagtaaagattcatcagtgctcagatatctcctttccctgattggaagtcttagaaaatgcccccagtcttagcctttcagattggtttgatccagcagttactcagcagactggcttttgagtatgagaatgtccattgctgtgggaggaagttgctagcatgagagacttgaatatattctttcggggtgttttataacataatgtgttttaccagagcttgtagttttctcttaacttacttatttgactaatgtctgttttctttactatgctgtaagttctatgaaggaagtttctttttctcatgatggtggaatggatggatgatttgctaagctcttaagatgtcaagtagcatattgtatttggtataatggaagtaggggtctgttccaagtttcttctgtaggaatgttgacaaaggaacactgaaagaaatatgcctttgggagctgtgtcttagtaaagggtgttatagaacggtttctgactgtgtcatttctaaggaaaacagtgttttgtttcttactagcaggatattcatttatattaaaaatatatattcactttagtgttttgtcattgaaatatgctttcagtgtaattatctgctttgaaggaatgatttgacacacattatggaaaggtttagagctttatagtgagagttgaggtacttcccagcatagcatcttgcaactccatacgtggagtttctccctgggtgccagatcccagatcagtggttcaattgtacccgctcgtgggcctgtcctggacacacacctgcacagagggagaagtgaaattgagagggagtgttgaaatttccctgcttggagtaaactgttgttcttatcacaaaggaagtatttgggacttctgtgaacatggcccatggccttttctgagattccctgccctctgacagcttgttttgtgtattggaaaggtctagatgaggatggctctgcaggaatttctttttcactgtaagaatctgtctcccatggaacccaggttgtcccagggtatggggagacagtggagactggtggtttcaggatgatccaagggccttgggggcagatccaccaggacagaaatcccagctctgccgtatactagctgtgtcaccttagtcaagttccttaatggcaatggattatattttcttcctgtatgttagagatacagataatatctcttttctaggaatttagtgaagattaaataattaaaattaatgaggattaaataaggtaatgtatgtacagctatgggcatgattcctggcacaaagttagtgcttaggtaaccattatcattattcttatttctgtttggtttgttgattacttttaacatgtgacatactatttgggctaatatgacgtctgtttggctcacccacttaccttttttattgatatgtaataatcatacatatttatggggcatgtatactattttgatatatgcctataatgtgtaatgatcaaatcaaggtatttagggtatcagtcacctcgaacatttatcatttctttgtgttgggaacatttcatatcttctagatattatgaaatatacaccgtacatcagttagccatagtcatcctactgtgttctgaaatactggaacttattccttgtatctcactgtatttttgaacccattaagcaacctctcttcatccttcccaccccaccccacccccccgcttttttttttttttgagacagagtctcgctctgtcaccaggctggagtgcagtggtgtgatcttggctcactgcaacctccgcctcctgggttcaagtgattctcctgcctcaacctcccgagtagctaccatatgtgctaccatgcccagctaatttttgtatttttagtagagatggggtttcaccatgttggccaggattgtctcgatctcttgacctcgtgatccgcccacctcggcctcccaaagtgctgggattataggcatgaaccacggcacctgactcccacccctttcttagcctctgataactctcattctactttttacttccttgagatccacttttttagcacctacatatgaataagaagatgtgatatttgtttttctgtgccttcacttgacataatgacctccagttccattcatgttgctgcagatgacagaattccattctttttcatggctgaatagcagtctgtgtgtgtgtatttatccattcatccattgaacacttaggttcacttcatatcttggctgttgtgagtagtgctgcaataaacatgggggtacaggtatccctttgatatagtgatttccttttctttggataaataccaagtagtgggattgctggattatatggtagtactatttttagctttttgagaaatctccatactgttctccataatagttgtactaatttacattcccaccatcagttcccttttctccccatccttaccagcatttgctatttttaatcttgatcatagccattgtaactggcttgagatgatatctcattttgattttgactttcatttccctgataattagtgatgttgaacgttttttaatataccctttggctatttgtgtgtcttcttttgagaaatgtctattcagatctcctgcccactttttaatggtattatttgtgggttttttttttttctgttgagttgagttccttgtatacatttacctttttaaaccaataatctcattagaaagctttttttttgttttaaaaaaatatgtatttaagttgtataatatgatgtttcagtatatttttgcatagtgaaatagttactatagttattcttcttctgtgtaatgctatttgatttgtttttgaaaattatctcccgagattttttttttctgacctgctttcggaatgctatccttgggtagtgacttgatttttctcttaaattccatcttgtttgtaggcagacagccaagtggacctggtccggcagcatttctatgaagtatccctggaatatgtcttcaaggtgcaggaagtccaagagagaaagatgtttgagtttgtggagcctgtaagtagatattcagggtttaatgatgtacccatatattcatccctcattctaactagtagtagattacaaaatgctctaagttgttgatgaagaggttgagcagccctgacactgtcccttctgtaagtatcagtgctttgcgagcctggctgccttggattcttcccagcagccattcctgtacaacacatagcaatggagatagagcgtccagcagtcattccttcctctggctacccaatgatgtgccatatgattttcaggtggacagagtggaaatgggagtccagaggggaggggttctctatcttgccatgaaatagtgattataccttaacttccctcctctctcctacccttcttctcttcctcaaataattcagatgtagtagtcacccaaagacatagtacatttctctttttaccctgtggttcaaagccccttctcaccccattcaggtattaaaagatgctatataaagtttctcacatggatttcccacatggatttgttataaacagaacagcatagagactctgctgagtggaccatgatggaatttggacttggacactgtcccagtgaacatgaagattgcattgtgggaaaaagcctgactttagtttaggccacaccagcatggttgtggtttcatttggacatggtgccactccactttgctgggtgtggcactggtgtggagaatccacagcaggaagacttcatggaaacaccaaaatagtatatggacctcaatttaaaactctcgcagaccatggattttccagccaaaatgcagcctctgatttagactcaagcatggcatctctgtacaaataagattctctacctagatttaagaaaggataattttcttttttcttttttttttctttgagacagcttctcgctctgtcacccaggctggagtgcaatggtgcaatctcagctcactgcagcctctgccttctgggttcaagcgattctcctgcctcagcctcctcagtagctgggactacaggtgcacgccaccacgcctggctaatttttgtattttttagtagagacggggtttcaccatgttggccaggatggtctcgatctcctgaccccgtgatccgcccgcctcggcctcccaaagtgctgggattacaggcatgagccagcacgcccgaccaagaaaggagacttttcttaagcaaataagaataaaactgtaagaaactgaaaggagtggccactctttctagtaaagagcattgtgtaccccatgtctaatttataaacttttggggtggatttttttaggcatgtagacttgctggtagtttcatcaagactccaattggtggccaggcacagtggctcatgcctgtaatcctagcactttgagaggctgaggcaggaagatcacttgagaccaagagtttgagatcagcctgggcaactgggcaacatagtgagactccatctcttaaaaacaaaaaaagattacaatcggctttggaaccttatgtctacatcttttactatgctagaactataatttctggataccactcccagctacctcatttggcagattccttaaagtcgtcaattacttcagtctccatatatgaatattaaaaccttagacctaacttccagcagtgtggtttcagtcaaggtcccaagtcaaaaatccccatctttccacagggtctgttaggtgtgagcagctatctgtcagataaagcagccttattgattttcctgcttaaagcacaaactggcctttcaagcaaaggtttactgaagacttgcttcctgtggtcagggcaggaatgcaaatgctgtcacatagaatttgcctttagcattatttttatttgcttttgccagactttctagagaaaaagaacagtgcatttctaataatctttatatatacttcgattaatattattccaaatttgcttgcttttgatgagttttttttgtaattggcccatccaacttttttgaggtgagtgttttgttatccactttgatctctcagtaggcgtacctagtgagtcaggtattttatctgttggcttttgctgaatggtatccacaaaacctcatacaacaatagatgtttacttctcacacatctgtgaggttcagccagcttaggcttggctcagctggatagctttgctgatctaaatgggttttcctcctccttcttctccttcttttgtctctcctccccctcttccttccttctttcttgagaaaagaaatctctaaagatttaccattccatttcctggcatcctgttgtagtgtgtccatgtcttagggagttttcactttaagaagcagtagcatcatggttaaggattctagagctagactccctgaatttaaatcccagcctagccatttactagctgtgtgttcttgggcaagttatttctctgagccttactttccccatctgcagaatggggatagtaatatcacctactttataaagttgtatgaggattgactgagtgtttatccatgtgaggtgcttagaacagaacctgattagaaccaaataaaaacttagcaattattattttttatttatgagcaaacgagtgaagtaccaatattaacagggcctacctgttttaatataaacagttttggtagctttaaaagtatgtatttattgaataccgtagaaaatgctgaaaacccaggtgctgtggctgaggcattcacagcctcactggggtaagcaagatgtgtgtagtagagagctagtcaagatagcaagcagttcagtgacagcttggacaggatggatgctatagatgtgccagagggatttaaaagtataaccatcgtagtgtgcagatgtttttcagttcatacagtgagaaacctggagagctaatgaaaagaaattttcagtctcatgttaggacaaagatagtaatagggatttgcccaaagttaaactaaatgctgagaggctggatataggattcagatgtttggcctttgcttttctacagaagttattgtctctgcacatcagcttctaggcaggtcagtggcttcaggagctggggatggggagaaggtattcatacagtgaaaaagctactgatgagatcagtgattctcagtgttagacatgcacattctcaggcttcactccagacctgaaatttaagggaggggcccagtagcctgtagtttagtaaaccttccccgtgattcagctgcacatttcagtttgagccactggcctagattatacaaaggaagaacatgaaataacaattgatgatattatctgaaactgtcgtgtaccgtgctaagcgctttacctacagtatgtcagtcaaaccttataacatctctgagggtaagtactgtttttatcccaattttcagatgaagaaattgaaacaaataagtttctttacctgtccaacatcatatctagtaaatagcagagctggaagggtctgacttttcatctccatgaaatagcatttgattgcttacaggtgggaaagaaaccagcaagaagtctattgaactaaattgctggagtgggtattcatatttgagttggttacagtcaagggaatcttccagtcatgtaagggacctctatgcaaatcgaccgtgttcatttgtttcttgaaagtaacttcaagtaccaggatattattgaccttcagaaaaagaaacagttgtagtattcccaaggaagaaaaatcagacttctgggatctaaatcagatcttttgggatatatatgtgtgtatatatatatacacacacacatacacacacacacacacatatatacacacacatacatatacatatatacgtatgtgcatatatatatgtatatgtatgtatatatttgcactggaagctttaattttcttgtcacagtactaaatgttcttgagatttggattgcagataatgacatattgactccatgaaggtgaagccacattccctctgttgcctgagttttcgtaattgaaggttggctagtgccccagagaactcattctccatgttcattaggcctgcatcctccgagttttccatcctgaatatttcttggtgcagtgtctcttcctctcctttccctctgcttctgtcccattgcaggccttcattcttttctctggactttgcattctgccttgggcctccccgttctccagtctggcctggaccagaatgcaccttctaacacgtcagtctgattctctctctctctcttttgccaagaagctcctgacagcactcctgtgctaagcccattacatggatgatctgaattaatcttcactgcaactctgtgcaatagtaaaaaccactgttatcctcttgtcaaagatgagttaaagggagttatgtggcttagccccctcagcttttcatcactctactagctgcccttctctttgttgcctgtgcggatgattcttggtagctgtattagtttgctagggctgctgtaacaaagtaccacaaattgggtgtcttagaacaacagaaatctgttgtctcacagttctaaagcctagaagtctgaagtcaaggttttggcaccaagatccctctgaaacctgcagtgaaaggtgacttcctttcctcctagcttcccgtggcttgtgatcatgtttggcatttcttggcttatagatgcctccctccagtccttcatcctcacatggccatgcttgtctgtgtgtccacattttcacctttctaaggacaccagctatggcatctttgtaaaagtactagggcccaccctaatgtcctcatttaacttgattacccatgtaaagaccctatttccaagtgaaatcaccttcagaggtattaggacttcaacatatctttttttgggggacacaatttaacccagtaaagtaggtctgttctatgaatggtgacaatccagagtgatgcagccagcattaacttgggcaattagatttttgctttttaaaatgaaaaaaataaattatgttgtcagctaggaagtaggaataggttttgcttatggttattcttttaggataacaaggatagagaaggaggcacagggaggcgggaaagatctttcctatgtcaggctgtgatgttgtggttgccccgtggacagctgacccctcttatttgataaccaggtgggactgcagcaagctcttcctcctagtgtttgggtagaagcatttctttgaagcagacagctcccccatctctggagtcccgtgggcttcatcctgccccctgaggagtggactttcatttcccactttgtaatacttcaaaggttcatatagtgttgggggtgggggagagaaaaggtgctgggaggagagaagcaagggggaagtgggccaaaaatagcaatatgttaaggagtcatttcccataaaaaaatggacaatcaaggcatgagactaaaggaggaaaaacaaaataaatattagtaactccctgcctttggggagcacttgcgggtatgcccaggtggcatcttagtgagctgtttgagaatatttaattaccccgagcaagagaggctctgtttactatgagtgaaggataaatcatagttaataggaggaatgaccttggaattaactgcttatcttctgcgttattctcaagtcaggggtagtgtcatgccttggaaaggcgatggggcagggcatttgcagatagcagggagagcagagttaagaagaggcaaaacagttttcactgtgaatgctgggactcggtttggcagaggagcctcctctcctctgttattggagccatctaaaaggaaaggtatgggtcttcctctcagaaaagtattttgtatagaataagcccaaagccttcggccgtctttgaagaaaaacattcattatcagtctctagtgactccatggggcttaccactcattcacggatttatgttaggggtctgtatatggtgccactggatagttttatagccagaggacccagcaatgcctactctcccaccacccatgagaatctaaggggatagatgggccggggacagtggcaatgggaagttaagggccatattgtcataatctgggttttatcttcacagggcccagatctttgattaaactgggctggcctgccctctgagtttaggtccagtgctatatacttttgtgcttactattcctgctgcaaacaaggtgggagagtagggggagggggggcgggatgagattcctttaccgtcacttattatagctgcctctcagaaaaggagagttagttaggtgaaaataagtgggatgggattatgtttagtaagtaaagtaaattttttttttacataataagtaatgtttaacaggttaaaaaaaaatcatttagggactgaaaatctgaagaccacaatgtaaaataaagcaaatgtgtcttggaataaggtggtatggcaggtcagggaggtcagagtggacccctcagaaaatgtgggtcagccttcagaagccgaagttaatgggatagtccccaaataccatggagctgtgctttgtgatagaggtgaggcactggtctttcctaaatctcgttcgggcttttattataatcctttcttcaggttgaagtttagaactgagggaagatgtgtagaacttgagaaggggccaggaaagcataacaacagtgaggtttggatgtaagctccgagaggaaagaccacaggaatgctgtttgtttagtttggataaatgaaggctggtaggggctcagggaggggacattaatagtttttaagtatatgaagccgtgtggtgagcattgtggtgaacagatgtttttaccattcactaaagacaagactaaacaatgaaacgggcttaccttttagcctgagggatttaattgagaatttagggaaaccaccataagtgaaaatgtgggaatatggaaatattttaataaaggaatccatagtgtttacttttgagtagtttggggaaagcacggaaacacacttcagttggatgattttctttgatttgactttgcctgttagactgtagactcaggacaccccacttccttttctgccttcctcttctgtgtaataacctgatactacaaatgtactagagggaaactgagtcagaaccctggtctttggtttctgaggaaatgatgttctcagcaggtggtgaggcccacagggcaagggcatgggtgttgatgccaaggagacctggtttcaagttctggctgccacttactgtgtgttttggggcaagtttcttaacctctctgaacctgcttcctcattattaaaatggggataacagtagtgcttaggtcatgggatgttgtgagtactcacccagggcatggaagggcatagtgcctggcacacaattggtgctctttaaatgtcagccattattattctttattttagactttcaagccagtgttgggagctcagatacagctacataatacctcttttcaacctggttatgtgacctttgcctttcttccttcattacagctgctggccttcctgcaaggactcttcactttctatcaccatggttacgaactggccaaggatttcggggacttcaagacacagttaaccattagcatacagaacgtgagtgggcatagggacaggcttcttttatctggttaaggaaaaacaaaatatgggcctgattgccctagaaaccatccaggtggcttggaatgtaggtgaggagggtgggtcttgcttgggttcagagggaaactaggggcaggcgtttctagagtgcttggtggttctgagttagaccatcatcctcttctccattatttcaaagccctatttatgttctcggaagtgctgctgctggttatgtttcaaatttgtagcgtctgtagcattggagtcaggatttcctttggcggtggaaatcccagcccaacccagcctccattctatgcatctagctgcctgactacatgagaccgtgtggagtgtgtgttctgggaatgggggctggggacacatgctggcctccagctcaaaggatgttctcttgtccaactcttaggaaggctggcaggaaatccaagtccgtgcttcgctcccagtgtggtcagcattcccaaggtttaaacacaggaccttttggtgcacagaatcctgcgtagggctttttggttagcagtcactggggcttgagcccccttcttcactgtgggattggaccatgttattcttcttattttctttgtctctaggtgatcttgtgtccatgtgggttgtactgcatgggttttagaagcctggaggttacatagtagtcagtgttgtctcagagaacaggaagttgcagaatcttggaaaaggtttcacaaagcatggcttccccttaggccaggtttctcagaatgcaggctctgaaatcgagattgacatgcagtgggcttactggaggtgggggcaatgctggtgaaaacacctgtgacagagtgagggcacctggactcgcagagggggaaatagagctgtgatgcagatgcagcagaggtctcagtgcaggggaggctctggagctgggatgatccttcaaagtcgccctgaatacaagcaagggggccaggctttcaacccccttctgcctttcctctagccttgtctagtcattgggtgcaggctgaccttgagtgaaggaactccccttttaaggagggactcatctgtgagccatcagcaagcaacattcatggcagctggagaaatgaacgcctaggtccttaagtcatacaggcccctagagcatctgaatcagaatcacctgggaggcttatcgtaaaacacactttttggcatccagaggtgctgaattgatctgtaggagtgagggctgggcatttgcattttctataagatccctaggtgattttgatagtcactagagtttgagagtcattctggtataggactttaaggccaaagtatacttgtcataagggagtatttggccagttcctggaaggttgaatgtcctttatctcattttagatctaaggattctattaggttgatctggattgttaaaacagatactttgtttctttgatttgaataaaattattttcatcctagacaagaaatcgctttgaaggcactagatcagaagtggaatcactgatgaaaaagatgaaggagaatccccttgagcacaagaccatcagtccctacaccatggagggatacctctacgtgcaggagaaacgtgagtgctttgactagcaacagcttgggatgtactcaggcctcttacctagaaggtggaggatgtattcagcagtgcctaccttactgtagatacatgcttggataacaagaacaattttatagttcacctttccaaagagaaagatgatgtccacagaatcttgtctacctttgtttttctttatgaatgggaattcctttgggaacctgcaattctttaaggctctgtggttgctcttctctctctaatgttactctactcttggggttcctgtacccctagtccagctttatgtaccataccctgagcatagcagccttggaaaggtcttacatgctaggcccctgttatctatcagcagtgtatcctttggtagacttaatacttggtgattctgttttcatttgacattgtttcagcaaggcccaaacaatcatgacttaggcctttttcctcttctcctcaactcatttcattccaacacttgaattttatgaaaagtaggaacaaaggctcacttcaagagccaagaagaaggctgcatgcggtggctcacgtctgtaatcccagcacttttggaggctgaggtcggtggattgcttgagctcaggagttcaagaccagcctgggcaacatagtgaaaccctgtctctacaaaaatacaaaaagtagccaggtgtggtggtgtgcacctgtgggcccagctacttgggaggctgaggtgggaggattgcttaccggagtgagcctgttgaggtttataagagctcaggaggtggaggctgcagtgagctgagattgccaccactgtactccagcctgggtgacagagcaagaccctgtctcttaaaagaaaaaaaaaaaagagccaagaatactcattgttctgccagtgatgtctaggaaaggaatgccaggtgctgctaacatggacattttagtgatgactcacaagttcatgccttatggctggggaaaggctctgtgatggggccgtgccgtttaggatagcacattcagacttaattcgtgtatgcaatgctaggaacgaaagaaagtgaatgtttttttctttagtgggtaattcttctcctagtcctttggtagagaacattggtcttttcagatttttgcaggttttgtgttctttcatgtcctgctcttcatgtagagttaggcagatgtcttcactcctaatagctttccgatgggatagaatagaaatacttggtttcactaattattctatttagtaattactcaaaaatttgtttggacttaagtttcctggtaactggggcagtagtggtgttggagtattggctgtgatgaggattacattccttattcttacagagatgagcctgttgaggtttataagaaatgtagctacttcagctgtgtgttttgtatatgcctgaatacaaagtgatcccctctttgcccagtgagaagatccctgcaaaaggttttaggtctacttgaaaatataaatttttaggactctaaaaatatagttcaaagtccacctataatacttaatttgttaatatatcattcacttacatatataaaatcaatgttgtttttttgcactctcatgtcacacacttttattcagacacttcacatgctctttcaacattagtgtgttgattatcatgaggacacttttttgttccctaacacagtccagagcacatgatggggatacagcactttttttttaattttaaattttttgtaacttgttattttgaaataatttcagacatacagaaaagtcgcaacaatggtgtaaggaacaaccataaaccctttacccagtgcatcaatttttaacatttagccacaatgatatcattccttctctctctgtgtgggtgtgtgagtattcacgtgagtacaacttgcatacacacacatacacacttttttctgagtcatttgagaatatggttgcatataccatgcttcttcagtagtgagtattttctaagaataaaagatattctttttatgtaaacacatctgttaggttggtgcaagagtaattatggtttttgccattaaaagtaatagctaaaatcgcaattgaactcttgccattaaaagtaatggctaaaatcgcaattgaactcttgcaccaacctaatatcaaatttaacattggtgcaatatttaatctgaactacagtccgtattccagttttgccagttgtatcaataatggccttctaaagcattttgttgttctccagtacagaacctcatactgcatttagttgtcatgactttagtctcctttaatctggaacagttctccagcttttctttgtctttcatgacattgacatttttgaacaacacagtccagttcctttatacagttttcttcagcatgggtttatctggtgtttcttcatgattagatttggattatgcatctctggtcaaatcctacataagagttcttctctggggccacatctggacacatgtggtgtcgacctgcccctcagtggtgatgtaaattttgatcacccagtcaaggtattgtctggtttctccactatacagtcactattttccccttgtaactaattagcaatctgaaggtaacaccttaagatcatgtaaatatccttctccttatcacactttacctccatagatttagcatccattgacaatccttgcctgagctgatctttactatgatggttgcaaaatggtgacttctcagttccaccaacccctccacatttaatagttgccattcagtgtacttatgtaaggaagagtcctgctcctctttcttcctccctctctcccttcctactgtctatccatccatccgtccgtccgttatccatctttccattgtcagtttggatttatgggttcctcttttgttcaggaggctataatttataactgtccttatttatcttgatgctcaagttgtccaagatacagtgctttgggaatctttgtgttgttcaattactggaattttttccccagtctgtaagaatacactaagatggtttgtattttcatttgtccttgacggcccagtggaaacatttactgttttgttttttaagtttactaaatgacatctaacacttgcagttggcagtcatgccataccattgataattattaaacgtctgctaattctctttatgtttaaacaattttttttttttaacaatttctgctgtgtgatctccataagcacctaaaactagtattggttgaagtcctttgcaggctgactaatgccttcttcctttaatagtgctttgttttcaagtaattggctaagcactgagtaaaatcagagacttggccagaatacgactgcatggcacctccctcttgaggtgacatactaatcttgagggacatagtccttagaggttacatgtgggcattgacagtcacttccactctgcatctctggtgtctctgagctctccttgtctgcttttcagatcttcttgagttctgctaaagtaagttaggggtttggaagtaggtcagaacccctgatgtctgtgcacagagtcacagagcagctgtgtgggaagcatgatgtcatcgcaacagatgggaatggtcacaagcgcttggaggaggctttctgcgttctctcctcaatcatcttactcctgtcagtgaagagagtggaaacttcagttggggcttgatgatgggaacggggattagtttccccagggaacctttacttccgttgtattttaagacccactggatgtagcatcaatgggaaacagtcttctttggtccctgggggaaatcccggggttggtttcatttgagcctgtgggatcagatttctgtctattcattctagctagtgtggagaatatattacttctaacatagtttaagggtagggtagatgagcattatgaattatgggttgtggtttttccagctcatgatgtatagcatacagtggaatgtatagatattttatgggaaatattacctttcaggtcactttggaacttcttgggtgaagcactactgtacatatcaacgggattccaaacaaatcaccatggtaccatttgaccaaaagtcaggaggaaaaggggtgagttcatttttaaaatttgatgtttgatttgcttggctaacatataatgattataatgcatgtataaagtaacacctccagtgttatatttatgtttcatcataaatttaaaattaataatttaaaaaatttttatatagtagttcaggaagcctaagaggctgaagaatcgctaaaataagatgattactcttagctctaacttacgttaggaactgcagttaagaaatatttttgtatttcacatatatacaatatcaagcgtatcaaatatttttatatgctgaaaattattgaataacctcatcctgtgaaactgattcagtcccactcccacttgatacctggagagctgccagtggcaacatagatgtcctggttacctattgctgtgtaacaagtcaccccaaaacttagcaacatttaaaacaacagcaatcattttagtatttctcattgtttctgtgggtcacgaattcagggggcatttggatgggtggttcaggcttgaggtttctcataaagtactaagcagacagtagctagagctagaacaaggagggtctgaagcagctcaagctggccagatacagctgtcatcctctctcctgtatccttttcttcccttttccctctttctctgcatactcccagggcctcgccatttggtctctctgtattagcaagtttgggcttcctcacagcatggtggcctcagggcagcaaaaggttttaggagtgaatgttctagaaactaaagtagacactgcattgccttttcatgacttaatctcagaagtcatagagccttacttttaccttatctattggttaaaatggtcacaatagccctctcagtttcagtgggggaggaggtagaccctgcctctccatgggaggggcatcaaagtctcattgtaggaaaagcacgtggcatagaaggtgatatgtagctatctttggaagagacagttgggcacatatggctccctggtgtccccgccattgggcagctccttgaatgctcctagttcttccctcctcctggctgttgcctctcgcctcctgcctgcttgtgagtctcctctgagtgttcccacagcaggccacatgcatttctatggaggtgacctgtcttttctctttgctcctatgctttattttcttcctttgatattctacatttcattatgatagccctagctttgatttttttcttttttaatctattgcttgggaggttttggttttccaggatttgagatttggtctcttccaataactctggaaaattctcaccaattatccctttgagtttcgcctccttcccattctattgtctccctctggagatatttaaatgtttttaatacaaatatttacatgttttatctgtttgagtctctggactgtattctgaataatttctcttactctgtcttcagcttaaatagtttttcatttgtgtctaacctgtcgataaactagtcctctacaagcattccacttcggtcctctctgcagtacatttttatgcaacatgttgagtttgcgtgtgtgtgggcattatagagtaggggttaaaagcgctggctttgctctcagtctgcctgggccagtgctgttaggtgctgttgtcattactgttaggtactcagccatgttgtgctccttgttctcttccacttccagtttttcttcctggctttcttttacttaagccatgatagagaagtttatcagcatctctgttccttccctgaatcaaagcaataacaaagccctttttatgtttcttggcaggggcaggattgatttataaataatctcaggaaaacagacattaaaatgtcataacagagaaattacatttaggaggaatattaaaaacctacattattaggtgtcccctagttttcatgaaatggaaacagagttgtgcctgctttccttggattgagccttagtcccttcccaattcttagtccttctagaaatcagcttcaccaaattgttctctcacacagtctgtttttgggccttttatcttgggctttctcagacttttaatgaagaactcttttgtattttctctattcctttcttatcacacttgaaagtgaagggtagaaaccaattatagtggatgtttggttctccagagacttcagagagttactagaaagcatgtcattgggtagtgaagaggtttatgtgaattagtatataaaaattttttggaacaaatcctgacacataatgggtgctatattaggaccttgatattataagagttaattttcctagtaattccttacatttaaattatgttttatatttttctgcaaccttttatttatattaccctgtttgatccagttttcctccttttacaaaggaggacattgaggttaggagagagtatgatttctaaggtcatttaacaagttacagagctggtgctcaaacgctctttccacagtctgaatctcctgattctgaactcattatacttcccatgacgtcactatttcctcagctttagggtgaaggaaatatgaggactggctgtctagaggtgatgtcttctcgattgtgtagaggaatcatgtgatgttgttgtatatattttttaaaaatagagaccgaggccggatgtggtggctcacgcctgttaatcccagcacttgggaggctgaggcaggtggatcacctgaggtcaggagttcaagaccagcctgggcaacatggtgaaaccccatctctaatgaaaatacaaaaattagccgggtgcagtggcgcatgcctgtaatcccagctatttgggaggctgaggcaggagaatcgcttgagcctgggaggtggaggttacagtgacccaagatggcgccattgcattccagcctgggcgacagtgcgagactccatctcaaaaaaagaaaaaaagaagaaatagagatgagtctcactatgttgcccaggctggcctcaaactcctggtcaccttggcctccaaagtactgggattaccagtgttttctactatgcttggcctgcatacatgtttgaacagagctctcctaggagctagaggtagatagaacatagataaatagataacataaatatcttttaacctagataattgggtgttttcttttcctaacatgctctttctccacctgttaggttccctcactgtccttttcatttggattattttcctttaaaagtacccactgttctcatagcttcagatctggagttgtgagcagatttgccacatcctcctggagaccagaccctgtgtgtgacggaagaatttccctgcatcctacactctgacctgaggcacctctgcagatctggagcagcccaaaaccgatcctatcccttcttttgattgaaacccttctttattttcctgctgctctcaggatacaaacgagaatcctacatggtcttgcctctgtcactcctcaaagtcttcttctttctactttccctcactctgggcttctagccacaccagctgccctgctgtttctccaagcctatgtggaccctgaccccagggcctgtccacctgctccattccctcctccttattttatttcctatgaattctttcagtttcagctcaagaaagcttttcctaaccttcctgaccaggtcagatctccttaactttggctttttaaaaacagaatttttcatggttataacttttcatttacttgtttaagtgatatccacgtcccccactttttaaagcaatcaatagttgaacagaccatctttatagatttttgctgatatggtatggtcatccttggaacagaatattaatcttcctcctctttctgcatgtatttggtgatcctttatatatccctattccctcccatttctctgggacacctcatgtaatctttcaaagtggaagctggtccatagccattaaatcagatttatagttagacatcagcaaaatcagaatctcttatgtttgggtgtttgcactcagatattttacagactagagaaagagcagttctgtctgagaaattaatctttgctattcagtggaagacaataggtataaggcctgtgaatataaactgtctcctcctaggccttctgtgttttgtttgctcttctgatattagtgggtggttaaattttaccttatgtagccacactttctgttatttcaacaaactgggcaagcttgctaatttcccctgttagtttagataaaaaagattgacagaggcaggagaaacagaaaccctaacaaattcctaagtgacagtaagaagaaatcagggacagcaacttctgtgtttctgggcaataaactagtgctatgagatgaaattgtcacattcagttgaacaatggaatactactcaacaataaagagaaataagcccttgatatgcacaacaatgtggatgaatagcaaagcaattacgttaagtgaaaaaagccagacaaaaagagcacatactgtgtagttccatttatataaaattatagactatgcaaactaatcaatagttacagaaagcagattcagcgattgcttggggatgtactaggaggagggatggattgccaggggatacaaggaaacttttggggatgatggaattgtttgctggcttggttgtggtgttggtttcatggatgtatatgacatcaaaatctataagttgtacagttcaacatgtacagcttataccttaatcatatgtcagtaaagttgttaaaatgtatttattgaggagctactcttttctaggatccagttgggcccaggagacaaaagtaagcaaaatttgacccagtctctgttctcagggtcctgtggtctaatggagagagagacattattgtattcatcacctatatcaatgcgcagtttcagctatggtcagtgctgtgatggagggagatgtacatggtgctttgtgaacacgttctggggatatttgttctgatccaggaagatttttttggagaagtgatgaccaacccaagatcatagaagctcagagttaggaggagaccatcttcttctactcttatcaaacctgcaaattaaaacaatgtcaacactcgtttatctaccatggacagatgcggtgccatcatgatccacccgtactaaagatgtttgggtccaagtctaacatggtatacgaatgtaagctgcatgaggctttgtcctggaaaggtttatagtcacccttccactgcccatggtcatgagcactcagatttgagaagatgaaatgattgctcctgtttacatgtcatgtatgtcctgggaggagtagagctcccattctggcctcatcttgatagtctgtgtgttcccactagggagaagatgaatcagttatcctcaaatcctgcacacggcggaaaacagactccattgagaagaggttttgctttgatgtggaagcagtagacaggtgagtagctagcatgcttttctcaggagcaaatagagctgaatttctatatcttactttttctttccagtcaaaccttttctgcttttttccccttctccccctccctccttcctttccttctccccctgcctccttcctttccttctccatccattcatctatgtccagggtgctggatccaggctattgctgatttgcgagaatcattagaacctccctatcttttgggttcagcactgaatcactggcttggttttgttttactttaatattagtgctttcatgctcagaaatgtgtgttatatctccaggagattgagtagtagacttttaaagaaaagtatttagcatgattgtatcagctatttgaattttttttaactgaaaaagttagtataatgattcgaaaggcattgaaatggaagaaatttttctcaaataaaaaaacagcttttagttacatttcacctaccagtgtgtgtgcgtgcccaggaaagacaccaaaccactcgtgaaatcacaattttttggagagagagccgtgtgttgtattcctcgagatttatagagtctctcattaagttgtaccatttcgtggtgttaagctagtttgacaacattccaattctttgagacactttacttggcaacaggttaattttttcaatgaaacccacgtgttaagcttatttgagctgcctgttcaagatcaggaatgctagcaccaagatccttaaatctcagcatgatactccgtataatgccatttaatctcttccttttattaaaaaaacattataccatttcatcaagccagtactcacccctccctgggaagttcatctgtggccacctttccctggctctatggcatcctgagactgagtactgcctggggttgcactgccttcttctggcaggtgtctactctgcactgcaggctgctggggctgctggaggctgttaggcctcccatggagacagcgtgcccccttagcctttatcagaaattcgtggaaactaactgcatctcttaagcaatttagtcattacatctttggctgtcaagccagacaacctgggttcaaattttgactttgctgcttagtagccatgtgactttgagcaaattacttaatcttttggaaccttgattttctcacctggaaaatgaagttcccaggatggttataaggattcaaggaaataatgcatgtaaaatgcttggcagaggggcagataataagtgctcaacaagtattagctgttactcttttttgctaatagcttatcctgcgtgctcctcagacttggtatttcacttctaaacacagagaggtacatatcctttactgtgtgtagaggtgtgagaggggaaggtaaagaagaatagcatgggtgtggggtcggaggatagcttgaactggggtagcaaaggggaattgcaaacagccttccccaaaccaaattttgttattactggttttaaacaaaacctaaaccttggtgctttaagcatctcccttctcttttctaagcatgtgattgaagggaattcatattattggcatccttgaaggaggttcagaagatctgtttgcatggaagtacagccacctgtgatgctcatcaaatgcacagttcctagagataaccgtctgctgcagagctgctttgaagagggcatgctttgtgttgcagctctctgtcagattggaaacaagcccaaatttgctttctgaagctgaattatttttgtgttttcatcttcagaagtttcccgagaagttgcggagagtggctttttaggcgattaaagctcactgtggcacctccatcttatttccacccttgccagcacttcctagcaccttccctcctttatgactcccacaacagctgtgcatgtcccaatcataagcaaagagcgaatgtgtcacattcagcatactgagtgggcttgcgagtcgattgctcctgagtttctgtccctggttccctctgcatggcgtggagagatttcagtcatggttcagttgagggggctgaatctcctcttttttttttttttttcttttttgagatggagtcttgctctgtcacccaggctggagtgcagtagcatgatctcggctcactgcaacctctgcctcccgggttcaagtgattctcttgcctcagcctaccgagtagctgggactacaggcactcgccaccatgtccggctaattttttgtatttttagtggagacggaatttcaccgtgttggctaggctggtcctgaactcctgacctcaagtgatccacccaccttggcctcccaaagtgctgggattacaggcatgagccgccacgcctggcctgaatctcctcttaatgaacaggaggtaagtagaccgtcctaggaaacacctcctctcagttttctatatagatcccaaagattaggttacaatacagcaggattttcctcctttctccttttttgaccccagtgcctttctgttttttttccctcaatatttagaagggagtccgggtagagaaggaaaaggcattttcatgcgctgggtagctgcatccctgggaactctgcccggaatccttttctctcaaagactcctgtactttcctttttcaccaatgtcctttagcgaggaggtgattgctgctagatgccctgctgtcctgccttccacaggttccccagctccacctgctggaccagagaggcagaggatcaaaatgcaagtttagcacctaggaaatgtggaagtgaaagaggggatggttatatttaatcgcataagggtttaaggtactcctggagtatgttaactggagaatacacaaacatttatgtagtgactagaaatgttttattctatcaagatacaaatacatgttgaagtgtgaagtatgtgacttagaatatgggatattgtggatttttaagattgaatacatttatcctttatacttaatgctgatatatcatgttattttgtaacaaaagctgtatcctttaggaggtgatatcctaggaggtcaatattgtgagttgattaccgtacatcaacgtattttactgtggtgaaaaccacgtgcactcagttacagattcctggtgcttgtcccacacccacacagttcgactttctgggactgagaccctgaaatccatattttcaagctttttagttgtcctttattcttactactacttggtatgttaaatacaatgtgtttcacaatacagtttcatcagaacacatgaaaacattttcctaatttgaaaaatcacaacaagcaactacagcaaaacaaaacaaaaaaaaattcaggctcctctactaaggagctgaatgcttacctgtatggaggaggagaatgtaactactaggaaaggtgatttctggtctctgagacagattacttgaccaggcaaaaggcaaaaacaaccaccacaataaaacccctgcctttttaaaggatgtgaaaatggaggaggagtgaggcaactggtagtatcagagcatttcctataagctgaacactttcatccttgtgttgtgtcatcctcactacaacccaggggggtaggtcctccattattcccatactgctgaggaatctgcagtgtagggtggtgaggccgtttactcagggctaaggtgggatttgaactgaggttctcaggagcctgttccagggcacattggtgcctcaagactttggaatttttttttttttttttttttagatggagtcttgctctgttgcccaggccggagtgcagtggcacgatctcagctcactgcagcctctgcctcctgggttcaagcaattctcctgcctcagcctcctgagcagctgggattacaggcatgcaccaccatgcccagctaattttgtatttttagtagagatgcggtttcgccatgttgaccaggctggtcttgaactactgacctcaggtgatccacctgcctcggcctctcaaagtgctgggattacaggcgtgagccaccacacctggcctaaacttcagatattttagaaacattttccagtgatgagctcagagctgttggtggttgcatttcagagacaccgcagtgtccagttttcaggctgtgaaatctgggaagtgctattggcaccctgtcagttgcatttggcattgtaaactacaatgaaactgtacaatataaagtacaatgaactgaagcagcaaatttgcctctcttcttatatctactcctctgtgaccttcagaaagtcctcccgtgactaaattaaaagaagcaatgcagatagagcacagtgacaggcacatggcactgaataggtgttccatgaatggttttttggtttctgtacaccttttcttccatcttttatttatttgtttagaggtgggtggggtctcctcatgttgcctaggctggagttgaactcctgggctcaagcaatcttcccacctcagctctcgagtagttgagaagataggtacaccactgtcactgtccctagctccaccttttatttttaaggtgacactctttttttttttaatccaggacagctagcatgagtaggagatatcctagcagtagtatcacttgtcagctaattgttttcattgtatcacaatacattgctgtcagtttgttaatcctcaaatccctgacacataagtcctacagaaaactgttgtcattctttgaacaacgaatgaactgaaaatcaaattaagtgttaatccaggccaatgggatttagatctatggttcttgaactttatgtttcaaggatccattttattttattttatattttattttattttatttattttatttttgagacagagtcttgctctgtcacccaggctggagtgcagtggtgtgatcttggctcactgcaccatctgcctcccgggttcaagcgattctcctacctcatcctcctgagtagctgggaccacaggcatgcaccaccccgtctggctaatttttctatttgtagtagagatggggtttcaccatgttggccaggctggtatcaatctcctgacctcaggtgatccgcctgcctcggcctcccgaagtgctgggattacaggtgtgagccaccgtgcccggccgaggatcctttttaaaaccaaatacatttctagaaatctacttttaattcttatatatctaagttgttttacctttgatatctaaaaagtagacctatactctcatctctgtgtccacacccttttgtattggcttctacatgatttcagaggtcacatctcctctaatttcttttctctagtgccttcctttttttcagaactagtttttggggtgggggggatgttcaaacctgaactactgaggaccctaggattacatggagcaaatgtttcacagactaatgttagctcttcatatctctgctttccctcaaaaagatttcattgttcctaacatcaaaaagctaaagttagtagaaattctttgtatttcttcaatctcaaaccgaaaacttgcttggatcaaggtatcatgtcagtccaatcaatataatgattctttgaaggttccttctgatttcttttgaaattcagtttaaagactctagcattaataatatgatatggctttaaataaatgtaacttgtagtagttgtgtggtatggccacaacatgctccaaaggataattttaaaaaatttcctagcagatactagttatagattaaattgtgtccctgccaaaatcatatgctgaagtcctaatccccagtatctgaaaatgttgccttatttggagattacttgatagagataatcaagttaaaatgacgtcattagggtgggccttaatgcgatattaccattgtccttgtaaaaaggggaaatttggacccagagatggacatgtacacgagaagataccgtgttaacatgaaggcagaagtcgaggtgatgcacctacaagccaatgaacaccaaaggttggcagcagagcaccagaagctagaggagaggcatggagcagattcttcctcacagacctcaggaggaacccttgatcttgaacttttagcctctagacctgtgaagcaataaatttctgttgattaagccagccagtttgtggcactttgttacggcagccccaggaaatgaacgcagtttgaatagggagggcctttctcaatgaagcagcactcatgcacccagcagcctttaaatggataactcaacacctactgcttgaacaatcccattgccaaggaaccccacttcacaaagcagcccattcacataaattaccttcttcctttcttttcttttatttttttacatgattatagcctaagctttcattagctttttaaaaatcacccttttttggcctagcgtgatgactcatgcctgtaatcccagcattttgggaggccgaggcaagtggatcatttgagctcaggagttcaagaccagcctggccaacatggcaagaccctgtctttactaaaaatatagaaaaaaattagccgagcatggtggtgggcacctgtaattccagctattcaggaggctgaggcagaagaatttgcttgaacccaggagatggaggttgcagtgagctgagatcgcgccaccacactccagcctgggtgacagagggagactccatctcagtaaaataaaataaaaatcactttttttattctttaatgaagcagcattcttgggtgcttttgtattactttgccatagcaccaagcatttgaaggtttataatttatattggttaattgaataaagactagattgatcattacaaaatgtgtcaactctttgagaggatttagtgtaaaatttctgggttaaaaaatgggacatgatttcaaagcagccattagtggtagcaggatgtgaatcggtagtacttgcttatgtctgtgttctgtcactttgaataattcactccgtcatgcagtgtcttaaggaaattcatgagcaaatatagggaaaatatttgtttaggctaaagaatcatggtactagtcatttgccagcatccctggatttgtttattttcaagaaatttctcacagatgtaagtgacacgtggatattttctctcaggtgttttccaggagggcctagtaaaccatgtgaaaaataataaaactttttctgattccctgaatcaataaagtctcttgaggggcagtgtttacactggggaagggaaatgattacttttttctggggttagctgactctcaccaatgtccatacatttgaaaatgctgtgtgttaagtgcccctttcccagcattggtactctctagaggtgggcagcaaggatagcttcttagagatggcaaggatatttagtgctggagttgtaataagggataaggcaagaataaacttatcttcatggagcttacctttgagtttggaatgctcatatatactcaagcaactaaggtataaacaccaggatgttgagtgttccagcaaacctggagggccagaatactggggggaaagtaacaaacaagaggactttacccttccattcttacaggggacgatggcatgactggaatacgctgaattcattccctccctccttccttccttattttattgagcattactacatgctagagactactggcagtggagatataaagtttacaaatctgtaggactttcttaacagacctcatctgattttctttcataccagttccaaagtccttgttttgcaagctttccatgaataggtaaagggcagtagctctcctctgatctagtcccaacctagcatttcacatccactgtcaactctattcttcttcttcccaggtaacctgcatttgcacagtaataagcttttctttgtattggttggttgggtgtttaattaggtatgttttatatacctctgttcaattctaaatatctgtctcaggtgatttgcttccagaggcagaagaacattttatgcagcttttaatacagtaatatgtgcatatggctgttcaattttattttttatggtgacgtaattttgacatgggttaattattttctttgaggccatggtaaactattgtgtaagagactagaggagcttaatcaagttagttgctatttaaactaaacttttagcaggtgctcacttaacctgcatttgtgtactgttagggaagagacccaggaaaactgaagattggtgaaagtcagaatagtggaggccagaaagatttttgaaagatctgaagaatctactggaaccctcagcaccctcatttcaaatatgtttgtatggcaggctgcatgatgcaggtaaaaaagataagagcattcctaaatttgaatttgggatctgttccttactagctgtgtgactctgggtaagtggtttaaccacatctgtaagatggggtgaattatcactacattgcaggattttttctgaaggtggaacacactaatattcccctctgatggagtcctatgtctgaaaacatggctgttgaatttttttctataccctaaaacctggggctttattgttgtgatggtgaaccttagctttggtggatattcctgtgagcctgctttttgtcttaatggtgctccttttcctgtagtgtcatgagttttcaagttatctataagctgagaggaaatacaggtgcattcgggttatatgtgcaaagggcctgctagggtaagattccattttcaaactgtgtatgtgataacctgttgttgatacatgcttcaaataaagataaagtgttatgccctctctttccaatttatggcctcaagaagaaactgtattaattttaaattaaaataatattgtttcttctagcttgctaagaggtgtgtgtgtatgcatttgtgtgtttttgtgaaattgtgtgactgagattatgtgttttccaaaaaggatcatcttatgtaacagactttgtttcaacattcaacctctagatggcagttttgtgtatgtattagtaactattagaaggtccagttgaaaatcagctgtcctatatacaccttgtatacattgacagaagagtgtgtgtgtgtgtgtgtgtgttttctgtagaaaaaaataatcatgagagtattattccttaaaggaagaagagtatcctaaatgactcattcattctctagaaattccttcctcccaccctttcatcacaaatcattcatacccactttcttgcaaaaacaaacatgctcagttagttgggcctctgtttaaacattaccctttacctggctctttgaactaaagtgccaggccctttgctttaggaatggcttatttaggatggtgcagaaaagatgagtgatttcactgtcctgtgtgtgctgagaacctggcagtcctacttttccctcctggtgcaacgtgcctttatcttttgcaacacatgaatccatttttcctggtttcagacttcccctccctccccttctcaccccttgtttgaaataatattttattttgccttcctgctggttggattagagtgctggtctcaatgccatgacatttcaggcaggaaatggagttttccttcctcagagggtgttatatgactctgacttccatgacttgagttgggagacgataccatagtttctgaattgctttttggctgttctgtaaaataagttagtggagaagttcttggagtcttagaattcatgtagtttgaacttgtcatggagtttttttttttcttttaattaaatgagagcatgcctgtttgctgtttgattctggtttaacaaagaatggggtatggtggttaatggacttgattgggagggtgattgaggcaaccctatttttactctttagtctgcctggtgaaatatggagttttattggttgaatataccagtttatttaccaatttctaaatataaaatgagtttgtctttttaaaatcaaaaccaaaaatgagctattatgtaattctggatagaagaaacagttcaaccagtacattccacttatgtacatttctgttgattgtgagatagaatagtaaaaatgaaaaaaaaatacatgaaacagaagctatattttcatagtttgttatcaatagtagtaacaggtatttgcattctccttgagtctcactcatcccatcagtgaataatgccttgtccttgtgcagtgtgttaacatttgcttgcttctatgtccctgatacctagcatgatgactggcacataataggaactcagtcaatatctgttgcatttaagagccatgcaatttaatatgccaaagatgtctttgggcttcccgatgttttacgacttcagtctctcataaaaatgtaagaacttatctgatgtggttggtgatacctactttttagactattattattgctatgatcctaattattttaggaacattcctctaaaaatactaaggttgcaggctttaataggttatgattcattcatttattaggatcagatccttttttttttttttttttttttgatacggagtcctgctctgtcgcccaggctggagtgcagtggcgcaatctccgctcactgcaagctccgccccccgggttcgtgccgttctcctgcctcagcctcccaagtagctgggactacaggcgcctgccaccgcacctggctaatttttttgtatttttagtagagacggggtttcaccgtgttagccaggatggtctcgatctcctgacctcgcgatccacccgcctcggcatcccaaagtgctgagaggatcagatcctttctaaataattgattagaagctacttccaaaaccttcttagagggttgacccttgcttcctccctccctcctctttccaactctccttccctccctccctccttccttcctttcttcttctccttaagatgctggtctttctggatcccaggacatgtatgctacatgcacaggggggcagtacaacattgtcattaaagcatgggctttgctttagattcaggcacacctgggttcaagtgcaggctttggcacttactagtggtgtgacattatgcaagtaatttatgtgagtctcagtcttttcacttttaaaagaagaaataatggtagtgtctacttcatacagttattgtgaagaatgaatgataatacaagtaaagtccttagcacagtggttagcacataataaacactcagtaaatctacctgtggtttgggggctgccagttgcagcatcttctggtttcttacttcctctgtctctcacctgtaccacacccagattatcatggcatattattaattctttccatgcacaaaggtcttgcagaaggacctcaatggtttattacatcagagcacgcatagtagtgcagattcatatgttctgtctccaaatagtagattaccattgccttccagtgatggcactgtgtccttgagtattggaagaaaaagggaagtagcccaagttcctcctttgtggatgacctggagatactctcctgagtttgactgtaaggtgaatcaagaatatagacaggcatccttcattgttggtcttaatgcatgagatggatgactttataacatgtaatgatgacctagggtgaagctcagatagattcagaggaagacacagacaacagaagttgcaaactggtggtccacagacatgcttggtttggcttgaatagtgtttgaggcaacagtttaaaactgaaaaaaatctttaactgctgatcatgccttcccgcatgccagctaccggttgagctgaatgacagatatttcctttaggtggggtgtgtgctctctgttctgccgcagtccccaccatgccctgttgcccacctcccccatgaagacgagtgacagcttttttgctttgcacttgcactgttgtttttcccacagaggggagataattctttgttctttgtttctatctgaaagtaaaactgcaaaagaaaaaaccaagagcaacataagaccaagtctattttccttggattaaagaatttcttatccagtttccctaatttttcttacttaccgagtctccgtagacatttgggtctgtaatctcataaacagacatggaaaaggtgtcattctccaagattattctatgtggctttggccatatctttgtgtaaatgaagctcttctgaacccgaaccattgcattgtccaggaactgttaggaattcattttcccagtagcactttagaaacaaaggaccacttcccttccctggcacttgcaaaactcttcttgcaagtggatggcagctgatgctccattccttatcattcccctttgtctcctaaataagcataaggggcaggtttcagacacaggctttgagattgtgtgttcctgtgggtgcctcagctcttctactttgaatttgacccttaaatatacagtagtgtggatggaagctggggaatgaactcttgccaacagaagatttatagtcttatgaatgagtaaattctagatctttggaggttgatttagaaagaacggtactgttaaattctgagtgtttttgtttcagtggggtggagttagtaatagcttttccttgtccaataggaagtgggtaaattgccaaaccactgagatcactattgttgactcagattcaggaataagattagcgtaggaaagctgtcgagtaaccctggaattggggctggttgtgattctgtttgctcttggctggtgaggaggctatgagttggtatagccagtggtcccaggatcctgaatgtgttgctaaaccatatactgctttccatgggctgtttttaggggccagggttggaggagatatggtgttgggtagcaacttgccctgtaatagatggagagctgttttctccatggctcctgcagtgtgagaggtgaggtgccagcttagagaaaattccagatcctcgttcatgattcttaagcagatccagattcttaagcagatccagattcttaagcagatatagcactaaggacatattcagagtgaaaaggaagtgctgtattttaagtggattcttagggttgagctctacagaggatttttaagtcatttgctccttctctcatctggcgggtggagggagctccttggcagattttttagaatttgccaaagaccccttctctgttcttattagttatcagatgttaattttaaaagggagtggtaggccactttgttgcgttactcaggaggagaaaggaaatggccattatgtcagtgcaggtgtgtcccttcagccctcagccctgtgtgctttgtggtagaggcatgaatttcagtgctgtgtatgagtgtgttgggagtgggaatcacacatgtcattagcacctgtgggttgtttcttttccctttgaaactatacacacctgcccttctgcagccgtaattttaaccttaccccatacttaccatcctgttcctgctcaccccacctctacctgcccctgtgattacaactaatttttggagcattcatcgtgtgcctgacactttgaaatgccgcatacacttctcatataaccttcccagcatgccctgaggtgtaatcctggtaacgctgggagacaagtaattgaactgctctatgctactgttctttaaaacataggtaataagagtagcacagaatagttcagttgctagtctgccgtggttatacatctaggaagcactagaatcaggataactagtgagcctaagttattgatgagaagtcatagctcttgggtatttaaaacgatttttactgaggtgtaatcacagtaaaatgcatgactccaaagtctgtattttaataacttgttatacacacacaactgtgtaaccacccagatgaagatatagaatgtttctgtcactccaggagatacccttgtgccccttctcagtcactgcccatatctcttttcaaaaaaaaaaaaaaaatcactcttctgacttctgttgccatagatgagttttgcaagtatttgaacatcatagaagtggagtcacacagtcacataatcttttgtgtctggtctctttccctcatcattatgtctctgagattcattcgtgttgttgcatttagcagtagttgactctttttttaaaaaaattgttgtatggtatgccattgttcaaatatacaacagtttatccatttatcaatggatatttatttgttgttgtttttgcaatttttggctattctaaataaaactgcaggtattcctgaatgcgtcttttggtggacatatgcactcatttctcttgagtatatatgtagaggtagaattgctaggtcatagggcaggtttatgtttagttctagcagatattgccaaagtagttccatcaacttattctcccatcagcaatgtatgagagtcccagttactctacattttttgccagtattggttattggtggccttctaatgccctctattcaggagggtacttgttatatctcattgtggttttaatcacatttccctcataagtaatcagtttgggctctatttcttagccttattggccatttggatgtcctcttttatgaagtgcttattcaagtatttattgtattgggtggttcattttttcttactcacttgtaggcattctttacatattctggatatgattcttgcaggagatagatattacagatatcttctctcactctggtttgacttttaattttttaaataaaagtaattaagtaattaaattcatcttttgatgagtgtaagttcttcattttggtgaagtccaatttttcaatattttttctttatgattaggactttttgtgtgtgtgtgtttttttttttttttttaaaactcattgccttttccatctcttgagtattttaagacagataaaacatggagaaccacttctatagaaagtaagccccagttattctggacgctattgaattcttgttttggattagctcgttgcctagagtagcgttgtaagccctcatatttatgaagcactttaggtttttacagagctctttatcattcaatctcatttaatcccgtgcaggagctcactaaggtgtttgcagaagtgcatggctgattttgacaccagaggacttgggtggtcaacgtgagctctctgggggctgcggtgccatcacatttgccatggcattgtgcacaagagttaagggttggaatgcctgtgttcacatcctggctctattatcttgccagctctgtgattgtggacaagatacttaacctctctgagccttggttttctcatctgctaaaggggaataataagaatatacttttctcatgatgtagctgtgaagagtgggtgaattaatttatatatagtgcttagcacagcaactggcatatactgctgggttataattattactgttcttttattgtagagggtctaataggctcacaattctttgtagaggtaaaaagagctctgatatttactccaatttctctttcattgttttatatgttcccttcctcattccatattatcctccttctttttttattttgagacggagtctcgctctgtcgccgggctggagtgcagtggcatgatcttggctcactgcagcctccgcctccagggttcaagcgattttcctgcgtcagcctcccgagtagctgggactacaggcgtgtgctaccacgcccagctaatttttgtattttttagtagagacagggtttcactatgttggccaggattgtctggatctcttgacctcatggtccgcccacctcggcctcccagagtgctgggattgatgttagtcactgcgcccggcctatcctcctacttttaatctctctcttctctgtctcccctgccctgcccattttttgctatgaagaaccacatgcatttcaaacatgaattaaattgacatcctgtaagagaaggtctcaaagtatgttattgtataggaactgacatggaaagtggagggtcgttgagggttttgcttgttttattttgttttgagggatagttgttagtagggacataaggaaggtaaatatggaaagaaagttattgttttactccagaataaagatagttcaccctttttatcttggttcttggaaattcacatgcaagacatgtgaatccgtcccctaccccacttcccctgtaaaagggaacaagaccacatgtggaaaagaacttgtattttgatatttcttcttggaatgaaaacaaatcctgttgactttcctggttaccaaggccaagtggcccacccttcacagcctctgaggttgtcgaacttcctctgtggcttggggtggaaatctcacactgtgtgccatgaagttgatgtaatatatgtgagcccctgagaccttggtatgtagacagctcttgtgatctcactgtttgctggtgagccactagcaggaaacgaactagagacatgttggctccttgacctcactgcagaaaggagggtaactttgctctctagggcagggggaacaggaaggaaaagagtagggatggagtggacagcccagggtgtgggcctcaaacttaactctgcatcaagatcacctggggagttggttaaaatccaagttcccaggcacagcccagttcagattgagtagagtggggttgggctggaatctccatgttaagggaatgtctgattctgaagcaggtggtacaggagcagcacctacagtaacactcaaagacccaaaaccggggacttgagagttctgcaatagacagtagctgcagaggctttttgtttcaaagctattaagacgtcatacttggtctttagagaaaggtggaagggtggaatcagttcattgtgcccttaagccacagggtcagttctgtggagccaccactgtcagcagtctgcagatatccactgagtctggcacactgaatgggctgatggtgggaagtgggcacttggttgggtctgagaatgagaatttctgagaagaggagggagagtcctggaaggtgctcatggagagaagagttattccatcttctgagtcatctttgtattgtggtgccagtcccagtgtgaccttcatgggaatgaccatcctcttgggatcagtgttccaccatcatcaacacgcccactcatctagctgcccacgcctcccacccacatacaaccccactcccctttctgtctcttgcttgttttctcactcccttctcttgctcgtttgcatgctttccctctgtctctcccgacccacacgcatttacaccctcacacattcacacccctaccccatgccccttgtatcctcaacctgtctgtatttacatgcccacggctctaaatttttaaggggatgtcaaggaatggttaatgaaaagaatcaaatgtgacttttaaattatgttaaacacaaataggtttagcatattcattggaactatagctataagccagaagcagagatgatgggtgggtgagaatgaccaggcttgggtgcatatggggcccaggcttgtgctgctcagggtgttgctcagcctgtgtggttttaataccatattgttgtatgatcattagcagtgtttgtgtactcagacaggaatcggactttagttcttgctcagtggacctcttcctcctttttaggctgtctcaaattttaaagaggatggttttaactagcaattcttaactttttgagggttgcagttctctttgagaatctgacagacaatttgaattgtttctacagaaaaatccacatacatttgagggagaggaggaggtggtttggggacactctgggatctattttcaccctaaatgaagaactcctgctttaatgggcatagagggctttcagccgcttctcccaaggtcgtttttatggcgcagtctctttttcttgcggagtaccatttgtgatgggaactgaacaaaacccatttgatattgtatgcatgtcttctggagggcttgtgctcagttttagagagcaagcagatttcagtgagtgaaatgatctcatgcatgtaaagcacttagcacctgacatgattaagtattcatttttaaaaaatactgtgcacatttaatcataactaccaagatgatgaccaccataaaacttctccatgtctgaagcagtttagaagcagtggactagatattaggagacaagcatgcctccaggttggatattttctcctcttttttttatcttgagtccagtaattccattcacttccacaaacatttattgcatttctaccgtgagtaaaatactctgttaagcgttttgaggtctagaaatgaataagatttcaaggaattgaacaacgtctaaaggcatcacttaactcctctacgtcccttacctgtaaaataggatcatgtcttctgtgtttctgcctctctgagggagatgggctgactgagaggaatttgggccatcctttctgagagtagaaggtggcttagtaaagccgagtgttttgcccctctttgtgttgttaaccttagcagccactgactcttttgagtggatgtttaagatttgccttcaccaatctctctacatgtggcactggtttcatatccatgtccctcctttctctgcaggccaggggttatcaccatgcaagctttgtcggaagaggaccggaggctctggatggaagccatggatggccgggaacctgtaagtaacaattcagggaagtagagcaagaatgaaggccctgagttgtttgttgcttccctagtgcagtgatttttgctgctgttctaaagccttgggttcttgaaaccagtgtaccagaggtggttttttattcctaggtttatgtttgtggatattgatattgcttctgtatagatgtagttcttgagctttggcctctctgtcctaaggcatggcttctgcatagaattacaccagaactcccatcttttatcattgacttctggttcagcctcccgtagtaacttacctccccttataagcagcgggacattatcaggatggatggagggaggtgagcctggtaatatgatccctgctgccatttcagcgatgctggcctcagctgggtgatgtaatcttgtagttgttctgcatcttgtgacgtgtaaaatccataagagccctggaatcactgtagtcgtcttatcttagttccaaggatctcaactccagtgttcagcaaatctcaaggttgcagaaattgtaagagtacagtctaactatgtgccaccaacaaaagagaaaaagaatctacaatgccagagggccaataattgatacttacacaggtactgtccaaagggaggaaatgtgtgcaaggaagaagtaggccatgggctccattgactatagaactctttgcgtcaggctggataatgccagctgatttgtgtgtgtctttctcagcttaccctgatgaggtggtctggcaacatagattatgtacctttctactcagccatattttatacaaacatgggacgtagtcaactaggcataaagaaatagctagtattgtatgacatttaataatatagagcaagatctcttaaagatttaaataactgatgatttaggcacagtttgctaaactataattaagcattgtttaatcttaattcttctcctgggctaaaatataagatagctctgattatctctgtatacgttgttacccataggaaccctcaaaaccagatacacatttctacctttgaggctttatgggcacaatagctatttgatgtcaaaggcctttgaaagaagcttcctaagtaggtctttctttttgctagcattatctaccatttgttgagcacatttttacatgttaggcacaggactgagcacattacatctcttaacctgtttatttctcttagcacttaatgaaataagtgctgtgattccattttatagataagtaaactgaagcttagggaggttaagtaacttgccccaagtagcacagatagtaaatggctatattagtagggtacaggctaggttgctattaacagagagactctgaagtacggtggcttatgtaagatagataagtgtatttctctcttagagccgagaagggaggagtccatgcctagtagggtcattctgctatcctcagcccatggcttcccacattgctccagtcattgccattttccagccagaaaatgaggatgaaagcatttcgaaggacccagaagatgcacatgtcacttccattggctcaaacataatggtacagccatatctacctgcaaagcaggctgggaaacctaggctgtacataggcagtcatgggccctgccaggaccctggacatgttattacttcaaagaagaagaggagaaaggatactgtgaatagttggcagtctccatcctagtggcaaagctagaatttgacccatgtctaatcctagacatatttggttttcatctttaatggagataaaatttaaaattgccttcgaaaaattctcagttcatttttacagtactttcactcactcccttgaatgattcttcaactcataggggaggaagtgcccaggaagaacaatcctgtatgggattctattcttggtatgggcaaaaaaaagccaaattacaacaacaaaaaaacccaaacccactactgtctctccccctgcctccaataagctggagttctaaaactgcctcaccaattaattccattttaagtctccccatcctctctccccaccacttagatatttgttctctgtctgcgtataattggtcttcttactaaccacttcagttttcctgtagattaacatctggcctctgcagatggaaagtgtgctgttgaaagaaacatcttcttgctccagaatgtacaaatgaaaacaagtttaaacacaaaataattttgtttctaaacatgatataaaattatttcctcacaggaacatatagcttgcactgaaaaccacacttctgtgtgctttttagtttcctaaagagagagataaatatagacaaatgatgtctgtgtaattgacagtaatactaggcttaattttgtctcccattgctgaaagcctctaggggacattactagagatatatgtccagtagacaattagcagctccagctttaatcaccatctccctaatgagttaaatctgtccccgtgggagctttggatttctctagttagctctttctctagtcggtgttagtgtcgttgccttatttcagggagctgttatagtggcaactatttcctgttttatacttctatctcagttgttctttgatggattatttggtgttggtggattttttttttttttggagggggttaattttagtttctgttctttttgttctttcattgtccaataataccttaggatggttggttgaaaaacaaagaaaaactaaatgagtcccaaatcagttgattttgcaacatttcatttttaaatgttaaatttagttttagcattaaatcatacttttttaatacacagtcatatcctagtctaaagaaatgttgaatgtctttatggtgtcgatggacatataatggaggaagaaattagaattgtcttcctacaataagcattatggattttatctacgtagtaaatttgaattattttaattcaaatgtgggaaactcaattcaaacttgaagaaaagctggatttattgggttacataactgaaaaatactggagtctaatagtctgtggctcatccgaatctgggaacttacataatatttggagttggtttcctcttttgtattggcttcattttccaacacgttcttttcagagtggtgagatgcttccttactattcattccaagcttacatcttattattaaaaacatgggtcagtaacctttttctgtaatgggccagatagtatttcaggctttgtgggccatgtggtcgcgattgcagctactaactttgctgctgtggctaaaaagctgccatggacaatatgtaaatgaataggtatagccttgcttcagtaaaactttattatttacaaaaacagatggctggcttgatttgggtcatgggccatacatagtttgttgatccctgatctgtaagtctagtggaaagagagcttttatgtaatcattccaagaaagttctttaattggattttattggactaactacttggtccagaggctaggatggatgaattgaccagaacttactcatgtgcccattgcactggagctgtataaatgatggcagaaggtcatcttcctctgagagaaaaagcattgttgtatgagggaaggaggtagacactagtcaagaaaagcagcacagtttctacttactctcagatgtatgttcctttaaattttatgttcagaaaacttcctctttgaaacttggccaaggggggaaatgccaagtttaccgctaacatcataattagggtaaaagactgaatgctttccctctaagactaggaacaagttgagggtgtttgctgtcaccactcttactcagcagaggactggaagtcctagtcagtgcagtagggcaagaaattaatataacaggcatacagagtggaaagaaaggtatacaactgcccccactttcagataacacaattgtctatgtagaaaatcccaaggaacacacacacacacacacacacacacacacacacacaccccttctataattagtaggtgagttcagcaaggtcacaggatacaagatagacatatgcacaaaatcaatcatatttctgtagattagccataatcatatggtgatcaaagtcaaaagtgtaacaccattgatagtcagtctccccaaaaatgaagtgactaggtataaatctaattaagcatgtagagggcctgtgtgttggaaattacaaactgctgctgaaagaaactaaagaggatctgagtaaatggagagacattaatgggttggaaaaatcaacatagtaaagatgtcaattctccccaaagtgattataggtttaatgcaattcctattagaatcacagcaagatttcttatagatacagacaagcttgttctaaaatttatatataaaggcacagaaaccaaaatagataaaacaattttaaaaaagaagaatgaattggaagtagtctgtctaccctattttaagactttctttttagtgacagtaatcaagactgtggtattgacagagggatagacacgtagatcaatggaacagaataaagaacccagaaatagactcacacaaatatgcccaattgatttttgacagaggtgcaaaagcagttcaatggaggaaggatagtttttttgagaaatggtgctttttagaactaaacatccataggaaaaaaaaaaaaagccttgacttaaacctcatatcttatacaaaatttaattcagaatggatgacagatctaaatgtaaaatgtaacacttgaaaacttttagaagaatgtgtggaatctaggactagatgaagagtttttagatgcaatgcggaaagcatacacaacccataaaataaaaaatggataaaattttcttcatcaaaattaaacgcttttgctttgtgtgtgaaagaccctggtaagaggatgaaaaggcagtctacagaatggtagaaaatatttgcaaaaacatatatccgataagggacttatttacatctagttcttttttagatctaggattaaataaataaataaataaataagaactctcaaaacttaacagctaaagagaaacagtccaattagaaaaagggcaaaagacacaaggagacattttaccaaagagaatatggcgaataagcacaggaaaagatgttcaatatcattagccattagggaaatgcaatctaaaaccactatgaactatcaccttctagaatgactaaaattaaaagtagtgaaaatactgaatgccggcaaggatgcagagaaactggatcttctgtacactgctagcgggaatgtaaaatgaaacagccatgctggcaagtcacttggcagtttctaaaactaaatattgctgttactctatgacacagcaattgctctggggcatttaatccagagaaatgaaaactgttcgcacaaaaacctgtatgcataaacctccctcatagcagctttattcataatagcttgaaactggaagtactacagatgtcctttaatgggtgaatggttaaacaaactggtacatccatgcaatagaatactgtttggcaatggaaagaaatgaactattggtacacaacaaccgggtgcatcttaggagcattatgctaaatgaaaaaggccagtctcaaaaaaaaatatactttaattttgtaacatttttgaagtgacagttttagaaatggagaatggaatagtgatatccagggtatacggacattggaagtaggaagcaactataaagggggtagcacaagcaagtccttcgtggtgatggaatagttctgtgttttgatcttggtggttagttatatgaaaccatattaaagtagttatgagaaactgcagcaaagtatatgtgtatacttctgtacaatcctacatacacacagatgaactcatgtcaaaactgatggagtttgaacaacgagtatagtctagttaacaatattgtcctagtgacaattttctggttttgatgctatgttatagttttaaaagatagtatcattggattatggggggggaagtagggcaaaagagtcacaggacactactatttttataatagtatgaaattataactttaaaaaacaacaaagttagctattcagatagtcagataaagctttgaaatgattctgctggattttttcactttctgttaaatctgggttgacaaacaatagggtcactgttgcaactccataagcttttgttttacttttgtgtggccattgtctaaggcttgggaacagatgacttttcatattaaattggacacggaaaccttagttcagactgcataaataccacagctcaggaaaattttagagacagcagagtttctttggcgagtttccaataactaaagttgtctctccttttctcattgcatattgctggtaagcatgtttgctaaaagaaagtagaatagaatttctaccagcccatcatcattgccaacatatacacacccaacttgaagtatttaatatccatctgctatggaaaagatggctcaggaagccagggggactgagtgatccacagcttcagggcttgcgtagcctcttaaaactgcatttccatatatccccttagctgtgattagtggtgtctttctgcaactgcttatatcgcctccttattttagatgtattagtcctccttcacatttcaaggattctttagttaaataaaatatttctccactttgagctggtacttgaatctctttcgacagccacaagttttgaaggttggcagatgctagaattaggtggaattagattaagaaggtaagaaacagatactttagcatcaacaattgtgtgtaagtctgtgtattaggaaatcaccactcttgtaggtcaaaaatagccagatattggcaatttcttatggctccattcatagctgtggagcaggaagaagcaagcccacacgtaagtcaatatcatacccttatttatggaagagggaacactgcctaaaaaaggctggtaattggttgatctcggatagatgattcaggtctcttagcttccagttctgtgctatttttgcgcaacacacaaaaaattgctgctgaattgttaggaagtcacagttgaatggtatcaacctttactttttaagtagagttactctgctgtggctactgcagtggatgaagggaaaagaaggaagaggctaaggaaaaaccactcctctagtaaaagacaatgttacttccttctgctcacctccattttaaagatatcttctgttttcgtctttgtggactttggggctgaacaaaatgtgtcttctctcacctttctctaccgtgcccgagctctaaccccctagtccttctagaactcctggaataaatgggcaattgcattgcatatgttctgcatctaatatctgaaagagtgagctgtgaaaagtttttaaagggaaaagtaagattgattactgttaagatgagctctcaggattagaagcagaatgttatggtggttaagaatgtgcactcacacagcccaagtttaaatcctacaccactgcttattggcagtctcaaattggaaaatgacagtctctctgagcaggtttcctcacctgcaaattgtgataataatagcccctacctcataagagtgctttgtaaggatcaacctatatgtaaatgcctgtacatggcaaagtgatcatttaaagctagttcttactattgtctttttggagaggaagatggatattgggatacctgggttctatttctagctctgtttttaaattacttgattcacttagctcaagtcaccttgttccagttcaccagagtgcagggcagggactgctttcaatagtatggaaaatgtgatttcgtttagcagtcagtgtgaactttcaggatatgactggaggagcaggaagtaatctttagcctcctttgctatgatgcatcccaggcctagcagttcataatcctgctgtatgctaacctcagctcaccagtctgcggctgacacttgcgttttcctttctttgttaaaataagtgattgaaagagtatggatagttaggaaggtatggggtgagcttgctaggctctagtgtgacgatgcaggcctcagtcctttctgagctttctttttatttatttaattttttttaacttttaggttcaggggtacatgtgcaggtttgttatgtaggtaaacttgtgtcatggggttttgttgtacagattattttgtcacccaggtactaagcctagtacccaataattacttttcctgatcctctccctcctcccgccctccactgtcaagtaggctccagtatgtccatgtgttctcatttagctcccacttataagtgagaatatgggatatctggttttctgttcctgtgttagtttgctaaggataatgacctctaactccatctgcattcccccaaggggcatgatcttattctttttttatggctgcatagtattccgtggtgtatatttaccatattttctttatccagcctgctattgatgggcatttaggttgattccatgcctttgctattgtgaatagtgctgcagtgaacatatgcatgtatatgtctttatggttaaagaatttggccaggtgcggtggctcatgcctgtaatcccagcactttgggaagccgaggtgggcagataacgaggtcaggagatcgagaccatcctggctaacacggtgaaacctggtctctgctaaagatacaaaaattagctgggcatggtggcgggtgcctgtagtcccagctactcgggaggctgaggcaggagaatggcatgaacccaggaggcggagcttgcagtgagccgagatcatgccactgcactccagcctgggcgactgagagcgactccatctcaaaaaaaaaaaaaaaaaaaaaaaaaagaatctatattccattgggtatatacccaatgggattgctaggtcgaatggtagttctgttttaagttctttgaggaatcgcattactgctttccacaatggttgaactaatttacactcccatctgcagtgtaaattgtgttctcttttctccacaacctcactagcatctgttattttttcactttttagtaatagccattctgactggtatgagatggtatctcattgtagttttgatttgtatttctccagtgatcagtgatattgtgaactttctttttaatatcacatactatgaatgggtgaagagtctgaaagtgaaatccccagtgtggtttctgtttccccgtctcccatgctcacccacccctgatggctaggaaattacattatatgcttcatattattttgtttgcgtgtcttttcctctaactgaatcaagaagccagttgcaagcttcatttttgtgtcatgtgagtgcttttatttaggtggacttcataataggtgcatatgatatcacatcaatgcactgaagtcttacatttaataatattcacttatgtccttgttctctttggttagattattcagaagaacaatttctcatgaaaattaggaaatatttaattaaccaacctgagttacaaggttggagaaaagagaaagaggtcagttaaaattgttttatgttagagagttgatgaaattttctaagaaatggaaattttgatagccagagaatttttgcttgaactttatgacttatatatgttggtggcacttactcaggtcttagacattcttctttcaacattgagcaaatatatttagattgtccagcagtcactttgatgggtagtaaagatactaagatgaggatcggtcacattaacagaaatttctttttttttttgctgtactttccccattgcccagcacagtggctggcagagtaagcattcagcaagtatttgttaaacaactagagtcaaaactaaagggaagggtggaggatgaccaaaattgtttcttagggaattgagttgccttcgttatctgagacctgaattccttgattttatggtttatcttgacacatatttacttacttgtaccagaatttagctcagagattacattttttgtgccatggatacatttggcaatcaggtaaagcctttagatactttctcagaataatgcttttacatgtataaaataaaatacatggttacaaaagaaaaaattatatagaaatatagttatcaaagtattaaaacatttatgatacaataaacatgaaataagatatctgggcaggtgtgataacttctgtaagtgatattttgggctgtgtgcctatacagtaatgctacatggatttctgctggtgacaaagtcacaagtactactgtggtgtgttgcctgcattcatatttgaaggaaacaataaatttagaagttaatgaaaataaaaaggttttttgttcccactctctaagttcatggactccctgtatcctctctctagacctcacttcttcatttctttgcaaatatatttagagacttttcctatgaagtgcttaactcagccaggaattatacattgattagtgggactatttgattaatgtctgtctgcctgctggattgtgattgtggtgggtttttgttgttgttgttgttttggagacagagtctcactctgttgcccatgctggagtgcagtggtaggatctcagctcactacaacctctgcctcccaggttcaagcaattttcctgcctcagcctctgagtagctggtattacaggcacgtgccaccacacctggctaatcttttgtatttttaggagagacgaggtttcaacatgttggccaggctggtctcaaactcctggcctcaagtgatccacctgccttggcctcccaaagttctgggattacaggcgtgagccactgcacctgtcctggattgtgatcttgaagtgataggaacacgtgtgttgtttttttgtttgtctttggtggctttggctcatagtatctggcacagagtaagtgttcactaaatatttgccaaatctttagataaacctagggaatattaaagtatggttggcttggcatgacttcctatctgagactggttcctgaagattccctgctgtcttaatccattcaggctgctatcacaaaatactataaactgggtagtatagaaatatgtatttatttcttacatttttggagtctgggaaatccaagatcaaggcaccatcaaatttggtgtctagttagggcctattttctgattcatagatggcaccttttatctctgtcctcacacagtagaagggcagggcagctctctggagcttcttttatgagggcacccatcccattcatgagggctctgctgtcatgatgtaatcaccccataaggccctactttctgttatcatcacattaattattaggtttgcaacacatgaaattttttgggggaaggcacacacatttagaccataatgcccacctacctttaaggatatttagaaatccactgttcattattctaacttctttattaatttatcagttctaaatatagcacaaaagcccctttgattgtccttagcattttttgcaagcctcagatcattgttgattttatcttcataccactacctttataggcttgagcacctcttattttaattttgattacatgtacttctttaatcttttgccattatttttgtttatattagcttaacctttggggaataggattagttgtgagactttttgaaccttcttaatttgcttgaatttttcataatgcacgttaattttgttattaaacaaaaatcctactggtgggggttcctgtgagtctcatttattctttacccatctaaagaatgactttttctttgtcattggcattagttgcaattatgtagtcatgcctgggtttgtagagcctcctatcctcagctctaatgtgagggagaagtccctctctagagttaaaagtgtagtgtgattccctccagagcttctcctgtgtgtttactcctatacctgcacatctagaaataaacccttctgttgtgtagcatttttgacataataatagctttagtaatagattattaggcctttagtcttttacatttaggttgttttcagcttttgatgacatcattatgaacaacggcttggaaatccttgtatgaacttcactgtttactgttttgaacatttttctaggatacatatcaagtggaattactaggttgaatggtatgcatatttaatattccagtagatattgccaatagatagccccacaaaaaagcaccaaattgtgctccttccagtcacttatgagggtgcccattttctccacacctttgccacttctgcatttgatgagcctgtaggtgtatttatatgtgtgtgtatcaacctgagagtggaaaattgtatcttgttttcatttgtgtttctcagattactaatgagattgacaatcttttctcatgtttattggccgtttctatttatccttttttatacaaaaatgtatgtaagatacttagaacagtgtctggcacatgattcatgccatgcaaagtagtagtattccttgcttgagtttctggccttgggattatacccattgttttactcagttctgcttctaaaagcccaaggtacaaacctaagtttcgcttgtgttctttccttaactgattagaattctcctgctttatcctggctggtgtatcctgttttctagcagcgccgccccctccccaaccccattgctcagatttggagcagtgagcaacagagggtgtggcagccaaatgtgcactccttacctctcacctgggctgtcctcattcaccaggctgtgtgattcgacagggaacccactgatcctctgcatctctctgacaacagccagtaacttgttgtatttcccccagtgctaccaagtcctttctaactcccgagtagaaagtaccccatcccatctcaaggagccacaggagctaccatgtctaaccaatgcaagagttctcagcttagaaaagctccctgagggatatgggtctctgcctggctgacgtgtgtgctctttcagcctttctacctgtgcttctatctcagagaagagatggaagatgcctgccactcactatacctattctattctaaagggcagtctctgttctgcctgctctctttttgttaacgctacacacaattttatattttctggaagttccttcctccatttttgtggcctaggttaactactgcccagtcttctctgaggaggttggtgtgagggaggctgcaacgttgaaggtttctatcgccagctggttgctcatttgattcagaattaaggccaaattaagagttctctattttgtttcctccatctggaagatgatattttggcaagtcaagaatttatcagaggcttggttgtgtgtgtgtgtttgcattagctcattaaaagttttttttaaactttttattttgaaataatttctgacataaaaatgttacaaaaatattacaaagaattccagaatactttccacccagataacctaaatgttagtgtcttacataacacagtacaatgatcagacctggaaattaacactgatacaatattattatctattttacaagtcttaaattttgccagttatctcactaatatatatatttttctggtccagtgtcttttatcccagatcacatattgcaattagttgtcacatctcctcagtctcatttaacctggaacagttagaggcttggctttttaaaggaacatcaccactagctgatgtccagatagttgaacatcaggagagcatcctatctctgttcccatcttgcagtgtatctgggaactgttgtcactatcctcccttcatctaggtaataattcatacatttccataatcaaaccacttaagtttctctctctgcatcttctaaagcctctctgacatatattcaatctcagttttgtagatttccttgtaatacatctattgcttttgaacattgtatcttctaccctatctactcacatcatatattcttccttatacagtttgttatctgtattgtagttgttggtttaaagacatttgaggccataatatgatcttactagacattccgagctgtgacctctcacctccagcaacagcaccagttacattgaccctctttcagatattgggcagtgatttgtgggagtggagattatggttggattagcttcaattttttttttctttgtgggaaatgcaatttgcaaaagaaagttcttataagagtgagactttgttcatttgaagaatgatggagctggcttttctgtcaatttctgcagctttttcttattctccaaaaaccagaaagtggtaatatttgttagtgatcaaatcaaagatgatatttaaaaacacatgttgacaggaggacctagaggcattatgagtattagaaagtctgcaaattaggttgtttgctttgtggtgaggtgtgaaacaggatatgcatttttgaaaatgtatctttggatttgctgaactgggctcaaatgtggtcaaattgagagagcttatgatgccagttttactgcattctttttagttgtgttccccaaaatcctgccccatgacctttaccagaacaagtaaacacatcctaaaaacaaagttatgttctagtatggttttaaaagtcttcccttttggttatttggaaaatagtgcaaacgtgcggtctagtggttatggccaaaggcagagcaaagggagtgcggccttagccagccccagccagctgccattgctcccacgctctgtgtggtcttgacccaatgcccagaaaagcaaggttccccactttctacctctttatttttaaaagtaaaaaaaaaaaaaaaaaaaaaaaagagagagagagagatggggtggagggagaaactgagctgagagacctctcaggttagaaatatgtcctcttgcaattaaccattgctagttagttttcactataaatctaaagagagctttatctcagccaaactaaggaaatcatcaacattcttggggtaaattgatgtggactttttgtttgttcatttggagggagggagggatggtggtgctgctgcctagcattgaatatactggagtacttcttaacttaatctcttcttattactactttgctgagatgaatgtcatctttctcctacagtagttgttggctatgcaaggcattttggatggataccaatacccttctttggcaatttctctgcctagttcttacctctgtgtgttgtcatgccagggagatgttgacctgctgagggcagggattgatcctgtctgttataaccttaaaatttttgttagggtgcttagtagagtgctgtgaaacataataagcacctattactcactgaattaacttggaggcaataaattgagtggttttctgttaactagtctatactcaagttgatttgttgaatgtcttgggttttgttcattattgggccactctgaatggaaatccatgaaggcgaggatcttgactttcttgttcttcactataatcccagaacctagaacagcccctggccaagatcgttgagtatactgattgagaatccatgttcaataaatatttattattaaactaggtgcagtggtgtacgcctggaatcccagctgctcgggagtgtgaagcgggtggatcacttgagcccaggagtttgaggctatagtgtgctgtgattgcacctgtgaatggccactgcactccagcctgggcaacataatcataccttgtgtcttaaacaaaacatttttttttgaatgaatggatttaaaaaagagaacccaagagcatgtttcccttttcagacgcgggctttgatgcggcactttagacgtggcactttcaagcgattcaggatgccttttccttttcttagtaatttttagtatatggcagaaaccatatactaaatgtcacaccagagaaagtctcaggtcagaaggcttattagagcccagggatcaggaattggttgggaagtttgtaacactgtctctagcaccagcagtaaaattaggatgggtgtgcatgtgtgtatatatgaatatgtgtgcatatgtgaatatgtatatatatatgagtatatatgactatacgtacttgtgtgtattaaatatatatatatataatatgtattttaatttcttgccatctgctggctttctttgaatttatgaaaaatatataattgtgcccagagctctggttcctggtggttgtgttgccatgttgtaaaagcaagtgtgaccaccagcatccctgtggccatgctgaagaagctacttattgatagttaacaattgattttagtcagccttccatttcctgagacaattcctatactttccttagctcttttttttttttaagaacattaaaaacagaggttagaaggggatataaagcaagaaaacaaaataataatactttaaaaatcttaggacttaaaattggagggaaacatgattctgaaattcaggccagttttattaattttgtgtccatatggtaagagtacattaaacaggtcgggtacggtgactcatgcctataatcatagcactatgggaggcctaggcggatggatcacctgaggtcaggagtttgagaccagcctggacaacatggtgaaatcccatctctactaaaaatacaaaaattagccaggcatggtggcgggtgcctgtaatcctagctacttgggagactgaggcaggagaatcgcttgaacctggggggcggaggttgcagtgagccaagactgcagcacttcactccagcctgggtgaaagagtgagactccgtctcaaaaaaaaaaaattgaagaaagcacagaaatgtcctgctgaagttttatagttgaatttccagagagagagagagagagagagagagagagagagagagagagagagagagagagaggagagagagaggagagagagagagagagagagagagttgagaatagtagcgagcactaccgtccagtttttgttgcaaaggattcagaggccaagtgatgaatatgttcctctctatgaacaggctcaggacccgagccatatcactcaccagttccagtaagccttcatttttgccaccgtcatctctctaaccctaaaatccagtcattatgagtattgtccttttgctattctttggttggggccaatattaatgcatcagaatcagtgtttggaagttcagatcaattttacccagaaggtaggctgtttccttggataggtatcagtattttttctttggctcaagacttttcagtacaatgttctaaactccagctaccatgtagttgactttgtctatttattcatcagaatcaaaggaggattggtacaagcagaggaaatagacacaaagagcaagtatgaggggcagagtgggagggaggtagctggaatgtgaatgagccaactaatttggtgagcagggcttctcactctaggatccatggatcaatatggacaggggcatagtggtcatgtctgtgaaccctctgcagtgacatacagggtgttggcatatggacttgctaaggagaaaagttcatagcatttattaatttgtcaaagggccctgtggcctactgccaataaatgaaaactattgaccaggtcatttcatgagaataagtatttggaggaggttgctttgttcttaatatccagaaaagtaatggcacattatctctcctgggcccacttgtgagctgaagagggccttggaaggtctcagctgagtgcatctttctgatgtctgcctgcattttgatcttgcccagagataaaatacaaccttgtttctttcacagatgagtttatagagagaacaaacttttaggtatgggtagggtgtgtgtgtctgtgtgtgtagtggaggagtgaatggggaggggcaggacaggcagaaagctgaaggcggagagagagggaacccacatgcatttgagggatgtcttcagtctcatcatggggtttccatgttggattaaaactgattatatttacttcattttgattagtgtatatactttcctttttgtgactgcaacaattaacagttaaactagtggtgggattttttttttttaagtttttgggataggttctaaaagttgtacttgcaagaaagagaagtagtatcaatgctgcatgttctttttcctaaacaactctattcatttctttttctattcctggttcacacaagaaatccttaaggtgatcctttttttgctgcatttattttttgtttggttccactattgttatcagaatgtcatgtttcctacagcgacacccaatttgagttattgacccagaaagtcaacctcaaggtcataagaagttctgtgcatctgcccttgttttaaacttatcttaggctgaattatgatggatacctatttagattagagagggcccctcccaagtaaatacacaacacaaagatgactatatgagttatagaaataaagaaaactgttcaggaatgtggaatgggtcccatggaaggctagcatctgtcaagagagcccatcttgcttgcaaaccaagttactcctgtggtgtgtttcctgtgaagtagattctaggttggtagatctttgagaagtgagaataagacctttccctttccctttcccttcctctttccctttcccttcctctttccctttctctttccctttccctttccctttctctttccctttccctttcccttccccttccccttccccctccccttccctttccgagacagagtctcactttgtagcccaggctggagtgcagtggtgcgatctcagctcactgcaacctccacctcccaggttcaagcgattctcctgcttcagcctcctgagcagctgagattacaggcatgtaccaccacgcccagcaaatttttgtgttttcagtagggatagggtttcaccatgttggccaggctgatctccaacttctgacctcaagtgatccgcccgcctcgacctcccaaagtgctgggattacaggcatgagccaccatacctggccagaccttttcttaaaatggtagttgttttagggacctttaaggaaggctggaaatgtaaaaagagaaaagaggaagcaccaatatttattgcttatttaggccctggtgcctctgtgtattatttggagtagcagaaggaggatcagtctgggatttgggctggggtctaatctagtcagactttaggccagttagctaactttcagggcttgattactgtcagggtggtagtatgtccgtcttgaggatcttatcatcctttaagggtccttccagctctgagatgtgagtccagatcttctgactaaataatcagccacaacctggccactcagagtagaggagggccctatcttagggagtccccaggctgctgtggctgttcattcagaaagcttttctgcaccttccagatgggaggtgaacagaccacgagcggaatacctgagttggaggtatggcatgtggattagtttcctagagttaccatcacaacttccaccaactgggtgggttacaataacagaaatgtattctctcagtattggaggccagaagtcctgaaccaaggtgttggcagggccatgttccctccagggaagaatccttcctcacctcttccagtttctggttgctccatgcatcccttggcttgtggctgtgtcatttcagtttctgcctctatcttcatgtgaccacttctctttcgctgctcttctgtctctagtaaggacatttgccattggatttatggcccactcaggtaattcaggattatcttacctccagatccttaattacacttttttttccaaataaggtcacattcacagattctgggggtgaggacatggacctgtccttttgtgggccaccattcgacccactagagcaagggacttttctttcttggtctctgcattttatgggtgtcatatgccatctttgctgccaacattcggcagtgcagtgaaagatgcctctaactggggaggtttctcttctgggagtgttgttttatttctttttctgttgtctgagtcagaggtactctcatctgttttggtgtttgcctagagatgactttctcattccccctcaacatcctatgtaccgtagtgtgtctgcaaacagaggaaagccttgataccttggtggaggtgatagggtggagtgctggggcactggtgatagaagagtgcaaagttatttttaaaaaatggacctgacagttctgtggaccattttttcagctattcaaaggtacttatatttactctttgggagatcagtcatcccattaccactggcaattgggtgttactgtatatattttttagcatcccagctaaaaaatcttttcttttttgacagagtctcgctctatcacccaggctggagtgcagtggtgccatctcggctcactgcaacctccgcctcccgggttcaagcaattctctgcctcagcctcctgagtagctgggattacaggcaccctccactacacctggctaatttttttgtatttttagtagagatggggtttcaccatcttggccaggatggtcttgaactcctgaccttgtgatcctcccaccttggcctcccaaagtgctgggattacaggcatgagtcacagcacccggccccaactgtgcttttttgtgttaagatgattgtagccacaatgtcatggagaggatataacttataacaccttgcactagctagtccatgtaagttgttctgtggtttagcttgacaaaatgaacgcccacaccaaccaggattgtcctcactggattcccactactgctctcattcttgacatacaagggaaggtgagctgctcttcaaaattttgagcctctgaaatttaattcagtgaatatttattgggtataaactctgtaccagccactctataggtgctgagagagtcaacaagcaaacagattggtcacctgcacttatgccgtaaatagttccctttttccttctcgtgtacctttttctagccctgtacggtgcagtggttagttatcttaaactgaaaaacttttcatttttaaaactttcatgcaaaaagtctttgagcactagatatatacagatgtggtccatcgtagctggagtccatttctcctgggtttgtagctttcaacagtctagttcaagcacctgcttgtttcaccaccttcttcctttctaataggctcttcaagtcctgaccctggagaacactgcctgttacgctggttcactattttgggacttgccaaaattaaggcagcctgtcctgtatggacaagactgtccttttattcttttttaatttagtgaggtaaaacttatggagtgccaactgacaagagaccaaccaaaagaattttaccgtgtcccctgttttcttttagatgtagtgacttggtattacctctgcctgaaggtaggtctctccaccatctgcctgagataggggcacagagctgtctcagtttggcactaaagaggacttcccacagaaccttggttgacatcgtccatttggggtggggtgctagaaccacactcttcagacttgggtctctgttggtatctgatcataattttcttgtctcctttggaccaccaagggacaagtttccccattttaaaatacatgatatatggcacgcaagtatgctgtctgagcaaaggcgtttttaagcgagagctgtacaaatattatgcgttctaaccccacagcccatctctgggaaggggcacccagactttgggggctgttgttaaataccactaggcaatcatcaagatctgtttatctcattctttccatgaaatataagaatgttaggccccatatatgggattttcctgagaattttttgtaatgttcactcaatgcagagcccacatcaggttatgcttgctttctctgctcccgtggtcagaattttatctgagcctacatctacccctttggcttctcgtagagtccctttattcttataattgaaaattcccaaggctacctgtactctgtgttataaataaatatggtttctaacaagttgatgaattacacttcccacgcaacctcaactcttctggagtcattcagttggtcctgttttctctccagctttgttttctgtgtctcttaagaacactcaggttccttgttagtccacactccctggcttctcatccagcatctctacaccctcccctctggggatcttgccagttccctcacccagatcagtaacattttcaggtggcatattatctggcacacagtagcatgcagtacatgttgtataagcatatgaaacttgactagtgtccagtggtgatatgacgtcaactcagatgtgtttcaggtgttctgatgcccagctgactagatctagccctttgtccttatggagacactgcagtatctgtctaagggtttttctttgtttaggaatgtgcagtataccttttactgagatatttggtgtagggccagttcctgcactgcttaaatgtcattaattcaaaggtttatcatcaatttaataatcacttttgaggagcaagagggaaacatctcattaaagataaagaaggattataaaatgcattctgggctgggttcagtggctcacgcctgtaatcccaacagtttgggaggctgaggcaggaggatcacttgagcccagcagttcaacatagtgagacctgtctacacacacacacacacacacacacacacaccccccatctctgcacacacacacatacaagtttggtgtgttggcatgtgccttactctcagctactccagaggctgaggtgggaggattgcttgagttcgagaggttgaggctgcagggggccatgatcattaccactgctctccagactgggcgacagagtgagaccctgtctcaaaaaaaaaatttttttttaaagccccacaaaacaaaacaaagaagatgcattctgattgcagaaaaagaggtgtttgagaaacgaggaaatatggtacatagaaattcctggtgatgtgctgtgatgggcctagaggactgaataggaaaattatgtacacaggaagtttttgataggaatggtattatcagagaccccttcaaaaatccagtgaatactgtggactctctaagaaatttggcacaacacttatggggatttatggatcctctgaatctacccatatcacaaacctcccgcctcaatcattgtagaagagcatgtccttatttgacactgttggaaagctctccaagaaatgactgaggaagaaatttgtgctgttttctatcaggaaccttgtttagattattaataccaaaaagttatttaggcctttaatagggaaaatggaaatagacaaatgatcggttccagatgttagtcttgttgtggcctctttggccagggtgcatctcatgctgtctccatgcatctcatgctgtctccatgttgcactctcagagtgaatccttgtgaagctttatgcttacttggctttactccctcagaatgccagaatcttggctgcagcagtgagtggagtccagccagcctggtatttctttagaacaatctctggagggcttcttttacttgggactcttaaagacaacagggaattatctgagaatattcaaagccatattgtgtaatgaaaccaggcattggtattaagcataattgtgggccaaggcatccttgtttatctatgttttcattatctgagtccctgaagttatgattaatcaaaaatattaactgatgactgatcactaataaaattaatcacagctcaaatagccctccctgcttgatactttgatttattttaggacatcttgtctgtgtcctggtctgtctctgaatgacagataaataatcagaagcatgccaggcacagtggctcatgcctgtaatcccagcactttgtgaggctgagatgggaggatcacttgagcccagaaattcaagaccagactggacaacacagcaagaactggtctctactaaaaattttaaaaattagccaagtgtggtggtccatgcctgtagtcccagctactcgggaagctgaggcgggaggattgcttgaacccaggagttcgaggctgcagcgagctatgattgcaccactccattccagcctgggtgacagagagcctgtctcaaacaaaacaaaacaaaataaaaaagcagggcaaacagaaattgtaaatcattcaagacatctgtgactttatgaagtctatgaacatggtattggagacttgtattagtccatttttacactgctgataaagacatagttgagactgggcaatttacaaaagaaagaggtttaattggatttacagttccacttggctggggaaggcctcacaattatggcggagggtgaaaggcacttcttacatggtggtggcaagagagaatgaggaggaagcaaacgcagaaacccctgataaacccatcagatctcatgagacttactatcataagaataagatgggaaataccggccctcgtgattcaattatctccccctgggtccctcccacaacacgtgagaattttgggacatacaattcaagttgagatttgggtggagatacagccaaaccatatcaagacctcttgaattgtgtacgttgtcatagacaaaggaggagctggcatattagaacacttaatgaagagaaaacacaggagttgatgacttgatgggcacttgaaaagagtgatttgaatcaaaagaatgaggatggatttggggaaaattgatgaggctctcaattgcttttgcaagaatgataatctttttgatagtgctgtaataaagccaaacttaaaggctatcttacagcattatcataaaatcttgtagaaaaaattgtatctctcatcagcacttagtctttgtgatttcgtacacagttgaaataagaacataaatcttacgtaaatataaggttaccttattttgattattatgttatttttcaaaataaagttccatttagctctctgccttccctccaagaccatcattggaccataagatattggtcctcatgttaggggattcactttgtggctcgtctttgtaccattggtaataagaccttccttcctatacactacatgtgcataatagacagtaggtttgatacagatttctagatcctcctccctatggagagtctcttacgtagtttgatctagatttccatgctgcactgtttttattctctgctaccgtgtgccaggaagcctcttctcgcattgcagtgcacactgctttttatagaaagtgctcctgcactctctgccatgacccagagttcagcttaagtacagagaatttagcagttgaatggcaaggaaaacttctgcctatcaaaacactgcaaacagcgctctctctttttctctcttaccccttccagttcttcccactttcacgcattgcgttttgcacatgctcaggttctcaatctgcaaacgtacttgaactgggcataagcctttgagagatgctgcagatagtttttctagagagatttttgtttcataatgtttcagttaagaatggcatgcaactttaacataacttgaacacatttgaaataacatttgaaaaaactgaaaggacagatatgaaaaatttgaacagaggcccccaaacctatatggtcatttttgtcagggagcattttttgggctttaagtcatgtgtttagataaaccatttcccttccccccatttctcctccccctggtttggcacccagattgtgttttaaacaagttttaggattatgttaactcagcttttatgcaaagatgatctatgtaaaatgcctaaatatttagttaatttcaagatcgaaaagcctctgaggtggtattgtaaccagagctaaagataaatgcaccaatcatatgttgaatatatttaagattagtataagcagattctggccaggcatagtggctcatgcttgtaatcctgacactttgggaggccaaggcagggggattgcttgagtcttggagtttgagaccagcctgggcaacataagtagaccccgtctttacaaaatataaaacaaattagctggttgtggtggcatgtgcctgtagtgctagctacttgggaggctgaagcaggagatggcttgagcccaggaggttgaggctacagtgaactgtgatcgcaccactgcactccagcctgagctacagagcaagaccctgtcttgaaaaacaaaacagtataagtagattcctttttcagcagccttccttaactattgtgaccttgagatacaggtatgctaattagctgggaaaaatgagtgtcattagcaaattcaacataggccgggtgcagtggctcatacctataatcccagagctttgggaggccagggccagaggatcacttgaagccaggagtttgagaccagcttggatgacacagtgagacgctgtctcttaaaaaaaaaaaaaaagaaaaaaaaaaagaaaggaaaatatatagaggaaaatgtgcatatttgtttttagttgttttctaatgtaataaggaattattaaacttagagactatcagagcttgagaagaccttaatagtcattttgagcacttctctcatttatagaaaaaaggcccagagaaagaaaattcatttttgtgagtcacacaagtggctggtagcacagtctgaacccagagctgctggcccttaattttatgctccattatgtcatgctattatgtggacatttgtacagatgatagaacaaaagcacattcatttattttatcattctttgtcaaacttactagacactcacttcaccaagtatattagttttctgtcagtgtaaccagccaccacaaaatgattagcttaaaacaacctccatttatgagctcatagttctgaagctcagaaatctggcatgctgtgtgtgtgtcctctgctcaggctagaaatcaaggtgttggttagctgtgctttcacctggacttggggcccttttccaaacacatgcctgtgattggcagattgggtttcttgtggttgtaggacttgagtccacagatccttgctggctgtcagccaggaccccctcccagcctctggaggcagcgccatgttcctcctcttgaggctcctccatgttcaagccaaggccagcatgttgaatccaccctatgcttcacatcactctgacttcttttgctaccagccagagaaaacttcctgcttttaaagagctcatgtgattcaattaagcccatctggatatctctgtattttaaggtctactgacttgggactttaattgtatctgcaaaaccccttcacagtagtacctagattagtgtttgattgaataaccacaggagggaaacctcaggggagctatttttagaattctgccagccacatctgacaagtctggtggccaaactttggacaaaccctaccatgtgtgacactgttgtgaacctggaaataaaggtgggaaaaggcaactatatgggattggtctgtttttgtattccaagggcccagtaatagaaatggcctctaggcagcaatgactatcacaaaccccatgtgcttggttgaatagaaaagacagagtcatggcctcatggccatagctgaagctgtctcatccaagtaagacagctaggacaacctgatacagcaagaagtgtttgctggtagcagcagcagaagaaagtatactataaaagcacagtgatctgggtttacatacttctgtccttcccctgatgacagagcaccaaatagtaatcatgagcctaaattgacaaaagaagttaagttctatgtactcagtctaagagcagaaaatctataagcagttctctctcatcgatggattcactttccatagttacctattaaattagctgcagttcactgcagtcccaaaatattaaatgaaaaattccagaaataaacaattcataagtttttaattgcacatcattctgagtagcatgatgaaatcgcccagagcgtgaatcatccctttgtccagtgctgtctatccattagtcacctagtagccatctaggttatcagatcaaacagcagatacagggtttagtactatctgaggtttcaggcatctactggcgtcttgggaggtgtctcttgttatgaggggagactactgtaatgtgaaagaaactcccattgaaaaatggtttaaagtttagtacctaaaaaggctaagcttaatttattgagaaaagtagttcactttagtggaaccccagtggcttctcattaccttgaataaatcccagacctctggtgtgatcagaaaggcagccccactggccatttttctatgcccagcatgccaagctatttcccaccttgggacttttgctcatgctgttctgctggtcttcagtgttcttcagtttttcacttgcctctttccatagctcactctttcttcttcagatctcaacttataggtcaccttctcagagagggctttcctgattacctgattttataaaattaccacttgcctcttccccacctctagaagcttctatcaaatcacctgcttatcttctgtacagcctactatgttttcttgtttataatttttctttcctttagagtggcattccttgaattagaccttatctaacccacctttgtctcttccatgtctagatcagagccaggcacacagtagaaagccattgtttgttggagatttaaaaaatggatccacgctgggcacggtggctcatgcctgtaatctcagcactttgggaggctgaggtgggaggattgcttgagcccaggagttccagactagcctgggcaacgtggtgaaaccccatctctacaaaaaatacaaaaaactagccgggcatggtggtgtgcacctgcagttccagctacgtgggaagctgaggtgggaggattgatcgaggttgggaggtggagggtgcattgagttgtgatggggccactgcactctagcctgagtgacaaaacaagaccctgtctcaaaaaaacaaaaggggggtccagagagtttaaatgtcccattgtcactaaggaaaatcatggcataatagggagtagcactcagtttaagggaaatatcagcctgtcacctgacctatgggtattactggctatgaatttggcaactgggataagaatggcttaatgactagcccttgtgcagttaatcatagtaagagataaagtctatcctcctgtgcccttgatgttttcagccattctcccacaaggaaatatgttgaaaatattcaacttttagaattcttgtctttgttaaataaaattaaataaatgatcatcttttaatgtcccatttgaagtgttttttagttcttctcactcttcatatttttcctgcttgcaaattctcttttaaatttgttattttcattttcagcatctgttagacaaaaatgacgacagatccatttcctggtagaaattacacatcttttgaatggtgttcctaaccctcagcattcccaggtttgtttaaaatatcactgaccctttgagatactgctgtgtttggtactgagactgagttaatgagaaacttcaaaagcaaagcaggagaaatgcgagtggcgaaaaaatggacgatggaattttttccaaaataaaactctacgcctgtcttctacagattataccagacatttcatgccctactgaaatgtaaatgaggcttatttaatttgggcaactccatgtgaattttaccttgacaaatttgaaattgtgctttcaggtttttgtttgttttgccttttttgcatcctttaacctcagttcaactctcagccaggagctgtcttgagtaagcagcaattcactatgtactctttgggtggggctgcttttggtttttaacaaatatgaaagaataggggaaaataacaagaactgaaagagtaggaaaagccaacaccctttatgccccatttctagatcatttcattgttgaataataatatgataacggatacagggcatctttatagtcttaatcttttcccaggttataggctgccaaccagaaatccacaagaattttccttgtttgactaacaggcctgaatggtgaaaggtttttttttggttgtttacttgtttgtttgttttaaatgtctggttgataagctatctatgtacaaagctttgcttctacttgagtgtgaggtaagtaacctgaacccccaaacagatgagccatgtgaactgtgggtagaacagagggtgggcacaactttttccacaatgagaggcagcttaactcttgtttgtttttttaacttttattttaagttcaggggtacatgtgcaggtttgttacctaggtaaactcatgtcatgggagtttgttatacagattattttgtcacccaggtactaagcctagtacccaatagttatttttttccaatcttctcccttctcccaccctccactctcaagtaggctccagtgtctgttgttcccctctgcgttcatgagttctcatcatttagctcccacttgtaagtgaaaacatgcagtatttgtttttctatttctgcgttagtttgctaaggataacgacctccagctccatccatcttcccacaaagggcataatctcattcttttttatggctgtgtagtattccatggtatatatgtatatatatatatatatatatatatatgtgtgtgtgtgtgtgtgtgtgcgcgtgtgtgtgtgtaccacattttctttaacctgtcattgatgggcatttagattgattccgtgactttgctattgataatagtgctgcagtgaacatatgtgtgcatgtgcctttgtggtagaatgatatatattcttttgggtgtatacccagtaatgggattgctggatcaaatggtagttctgtttttagctgtttgaggaattgccgtactgctttccacagtggttgaactaatttacactcccacaatataagcattttcttttctccacaaccttaccagcatctcttatttttttactttttaatataggaaggcttaactcttaatatctaaacaccgtacttacaaaacaaattaggattaaaataactacatcaaaattattactaaatctcagatctcagcctaaatgtcacctgtgccttctcagagaggtgattactcctgattactcttctttataaaattagcactttccctcttcccaacctctagaaccttctatcaaatcacctgcttatcttctgtgcagcccactatgttttcttgtttataattcctctccctcctttagaatggcattctttgaattagaggatctctgtgcctattttattagaatatctgcaatattttttatagatcatcagaaatttaacagagtggaaaactgaaaggtgaagtgttccaagtcattaaagattaaaaagtaaccagaattcacgagaaagcaaagttaagttataatgattttttaaatggacataaggatcaatgggaaatcaagataaagcaaagctgaaattatggtattttgatggacttagtgtctagttttaaatgttttgttttgactgacagaactgaaatgctagactgtctgtttctatataggatacctggcaactgaagtaagacatatgatattaaaatatagccttttaccctgaaggatataacagttatgttgaggagatgaagacataaaaaagataagcatgaaatgtaagtaggcttaatgcagtttcccaaactttagttttctccctaccccgctttcagttttgatcatatacctgtaacatttgttctatttactaaattcttttctttgatttgattcactttctttatttacaaaatttccttttaaaaaaataagtgcgtatcctactacctatatcagtatcacttgctgaataaggaaaccctaaaaataagttaaatggcaacaaaactatattgttaagttctagctagatactttggctcctaaagccactgagcttatgccttgcttttctctgtttaaaacacacacacacacacacacacacacacaaaacaacaacagcagcaaaaaaaaccgatgttaagaactgtcaagtcttggagacatgccaatatcaagtagagacttcttttaggctatctcaccaagtttcaaaaagactaggaagggagtatctttctcaggtcgtgacacacaacctgacatgcatttctggatcacctgaaattatctcttgcacggtagcctgtaggggccagcctcacagggtcggtgggcttctccctgtgtgcggcgacgagagagtgtagaaataaagacacaagactaagagatagaagaaaagacagctgggcccgggggaccactaccaccaatgcgcggagaccagtggtggccccgaatgtctggctgtgctgttatttattggatacaaagcaaaaggggcagggtaaagagtgtgagtcatctccaatgataggtaaggtcatgtgggtcacatgtccactggacaaggggcccttccctgcctggcagccaaggcagagagggagaggagacagagagaaagacagcttatgccattatttctgcatatcagagacttttagtactttcactaatttactactgctatctagaaggcagagccaggtgtacaggatggaacatgaaggcggactaggggcatgaccacttaagcacagcatcacagggagacggttaggcctccggataactgtgggcaagcctgactgatgtcaggccctccacaagaggtggaggagcagagtcttctctaaactcccccagggaaaaggagactccctttcccggtctgctaagtagcgggtattgttccttgacactttttgataccgctagaccacggtccacctggcaacgggcgtcttcccagacgctggcatcaccgctagaccaaggagccctctggtggccctgtccgggcataacagaaggctcacactcttgtcttctggtcacacctcactatgtcccctcagctcctatctctgtatggcctggtttttcctaggttatgattatagagcgaggattattataatattggaataaagagtaattgctacaaactaatgattaatgatattcatatataatcatctctaagatctacatctggtataactattcttgtcttatattttattatactggaacagctcgtgtccttggtctcttgcctcggcacctgggtggcttgccgcccacagtagcctaggtgccatacttgggcaatccaggctcagtaggatgctgccgagacctagccacagtgattttgttggtctcgtgtactgggagtagaggggagtttttgaaagtcatccagtgtaaatagttggagcgttgtgttttaaagggcctgtaaaaatttttagtttaatctttaatagccggttctaaataagccttttgttttctctctcccactccttttccccttgcattttgggcagtttggtttctgttttcagtggtttgctttgtagcatgcagaatgggaatgattctataaggttgggatggcagagaaaagaatacagaaaagagtcaaatattgacacacacacttctctttctgtttgtaaggtctcagctgaggagtcacacataggaaaactctcctaatcgcatttataacgtactgtaggagagggcatgcacacctacacagacagctctcaggtatctgtatggatgacttttggcctatttggaattccgtgactaatttcctcctgctccccaatagggttcaactttgtattattttttttaattttccagagtactttgacatacctgatctcattttttctacatgccttctgttggcctgtgaagtgcaattaagaagacaactattctgtaaaagtatgtgtaaatacttggcctcctaattgcaaacagaatgacttgggttatgctcagcattgtttcctttcatgagtatgaataataaagtgttgattgtaggtgcatttaattgttaaaacccttcagaacagccatatagccatgaaagactttgttgtttatttaatagcttttggtctaataatctcattgctggaaaaatgtattccaagtctgtaattgagaagaagaaagataaagattctatacaggaaaatcgttcattaatgagttatcttttttcaaatgttttattttactttaagttctgggatacatgtgcagaacgtgcaggtttgttacataggtatacatgtaatgagttatcttttaaaagtgtaataatctgtgttttagccaacagggcaataagtaaactatggtatgacaaccctctgaatgcttatactgctattacaaccataaatactgaatgcagaaaaatgcttagccaataaatgaaaaatatatgaggatgtatgcatattattatcataactctttgtgtgtatatagtgcatattgtacatatgtatatgataccacacatagacacacacgcacactcacacatacgtacaaaaacccacagaagatacaggaaaataaaacagctgctgttaggatggcaaattttttttaaggtgttattcttaatgttcttttagtgctgtaatgtttttattggaagtaagattcagggcagggaaaacagaacgataaaaattgaccacatatgtataaaaacaagtgccagtaagacagagtgaactctggttgtatagagaagtcagatatatgtaaatcttaatagagccattcagtgtcaagcggttagaaggtgtatgtggcatcagtttaacttctgatggtgtggtgacctcccagcctccgatacccaccctaacctaacctagcacctagcacaatgcttggcttgttattgtcatcactaacggatggatggaatcagtggatggttttctaagaacataaatccaaattagaatttaagaggccgggtgcggtggctcacgcctgtaatcccagcactttgggaggccgaggcaggtggatcacgaggtcaggagatcgagaccatcctggctaacatgttgaaaccccatctctactaaaaatacatcagtattctattgatgtgccaatctaggcacttagatgatagaataataaggtaagataggtgggaaacactaattagaaccagaagcatttagttgggtaaatagaaggaaggaaagaacccagtttgttagagaacagaggatctgcaaagctggggaagtagcattctcttgggtatgaaaataggaaagggtggtgcacggatatgaatgatggcagctgggaggtgggtaaactgataaaatcagtgatgagcaagagtttgctagaagttcctgaagcttctggagaggtggtccttgctactattaaaggcattgttcaaagaagggccagaaaacccttggatcaggcttgtactcggaattgtttttagatgagtttccttgctcataggtaacagatccggagcagctttacttcttgcttctcctcctcttcctcttcctcctcctcctattcctccaccaccattaccaccaccatcatcatcccttttattattagctcatttaatcctcataacaactctatgaggtaggtcgtatttccctcagtttacagttttggaaactgagacacagagagattaagtattttacctaaattcacacagctaataaacagagataaaatttgaacccagagcatctggtatgagagccagtgctcttctccactgttacactgcacagttgcgcctgggtaagcaatgattatttccttattaaaaataaagacctatagcttcttagcctgtcctttctcaaaaaattatattaggatctctggattgtttttgtatgatatatttcaaaaaatttttaacatacaaatattagatatgctcactctcaaaatgcaaataatatggaagtagtatgagaataattaccctcattcctcccttctagggatgaccacaggtaatttttagtgactatcttttcagtcctctctggttgtgtatatatttacatgcataggattgcacttcttttgttattttatacatatatctttacatacatatgtattgtgcatatggatgtacatgtgttgatggaattgtgcttcacatgttcttttgctttttgtagtctttgtatcattgtcactgaggtctggccatgttaatgagtttaggtgtatatcactggagctctttgatttgccgttgtgtatcccttccctgacaaactgctggcacataatagatgctcaacaaatatttgtttaatgaattgtgttgattccattatcttatgccacaatgtttaagtagtcattttttattttactcatttatttacttattttcagacagggtcttactatgtcacccagactggagcgcagtggcgcactcatggctcattgtagccttgacctcccaggctcaagtgatcctcctgcctcagcctcccaattagctaggaccacaggtgtgcaccaccatactcagctctttttattattattattattatttatagagaagggggcttgccatgtggcccaggcttgtcttgaactcctgtgctcaagcaatctgcccacctcagcctaccaaagtgctgggataacaggtatgagccaccatgcctgaccaagtagtcattttttaattgaacgtttagtttgtttcctcttctccactagtataaaaaatgccatttcctcatttcaggaaggctggccattttgtgatgagacctttatagtttggcaggctcttggcaggatgaagatgaagctgttttctctccatctggccaggtatttgctggctgccgttgatcagtcccaatggagacagtgactcttgggaaattatttcctcctacattagaggccagatttaaacaaataaagcttgattttatgttggcctgttctttagagactctttatctttggtgggtagaagagctccagttggattatttgtcttttccatgaataatgttcgtttaactgaattagcaggggaagagcaatgaaatattagaaatgcttattgtaccctttagagtagtgcttcttaacctttctggaatctcagagcccttttagaatggctctgggactaagctgtgggtcctctgcttagagaagtgcacatgggtggtcagtgtatcacggcccctgaagatgaggagtatgggttgaggacctctgtacttaggggagctgttgcctgtgtttgccttcccttcctgcatagtctctttgctcttttcctgtgacagtgttttggtgacactgctctggaaacttcggtggcttgttgttgttgttgttcttgatatttttgaggttggggatgtatgtaaagaattaacaagtggattgcatcttggtaggcagaaaggaagaatacagcattttattttctgccagtgtgtataaacagcccacaccagggactttttgtagatactgttagtcatgttaagcagatgaacagggtgcatataaagtgtttgttgaacatgagagttggttgtaggaaaattcccactgagcccagtgctgcacacatattcagcactcgtgaaccaggccttctgctagattacaggaatagaaagataataaatcccagtttctgccctttaagggcttatgttctaggagagggtaagggtcatgaaatgaaataaatggagtagttttattagtgagcctggtttgtttccaaaggccagaaactggctcaaggaaaaaagagaattttttggttcatgtatctgaaaattccagaagtagcctttgactctttctgttttcctctctgttggcttcatccttaggttacatctttgtgtgtgacccaccagccatccacttctggcggctccaacctcatatcacccttaacagtcagcagttctggcaagacgacatacttcttcccctattgttccaatagaagtcttggagttgggtcacatgcccattcctaagccaatcattggggccaggaagagggcagatagaatatgctgattggccagggtgtaacagacaggggagccatctggactgtcatctggggaggaatggttccccaagggagaatcaaggtgttgttaccagaagtgggaatggatgtggggcaagtagaaacaaggaccactacagcagtaatctactaatagaagtttctgtaagatgtgggtggacaaggaagaggatgtgacggtcactctagaaaggctttctggagaaggcgatgtttaaccaagtttctaatgaatgagtcaatgaatcaaagactaaaatagccatctttcaggacataggattctttcatatgaaactttttaaagtgtgattgtgttagtttaaattctggtttcaatcccattttggtaaaatttaagattctacaaattttttaggtggcattggaggtttgagtttaagtaaatttgaagactgagatacaaatttgaaaataattttttttcagagatgtccattataatgatacttaatgtggtgggtctatgtatttggtacatattctaagtaggaggaaaataaccgaagttataactgtttctccttatcactgatcatttgtaagggactatgcttggtacagtactataaacccttgatttgttggtggggcagaataaccatggttataagtaaataaaactagcatgcttttgaagagaatgaaattgcaggagaaggaaagcatctatatcttggaaggttccaggtgcctagaacttgacagtagccattaggagactgctacccggtttctggtcagatgtgttcttgtctcactgaagccctggattagctgctatctcctcagctggggaggccccagggtatcactaattagcagcgctgcaggaagtttgagcaagtttaatcatatctttaagcgaagtcttctggtagtgctagactactcttttctgtacctgctgatttttttttagaaacggaggctgatgacaccttttgagtacttactgtataccattctttctgccaaaaaagtctcgtgtattgtttcttgatcctatgaaggtagacacaattatccctgttttgcatttcaggaaaccaaaagcttaaagaggccataccctcaactttttcaatttagcaccaagctaatctgagagtgcttgaaggcttctctgatgagcccagagaaagacaagaggaagctgacattaaggatgaggttgatttcatttcctatgtgatacacggagtttaagatacagttgtgggccaggcacggtggctcacgcctataatcccagcattttgggaggtcgaggcgggcagatcagttgaggtcaggagtccgagaccagcctggccaacatggtgaaactccttctctactaaaaatacaaaaattagctgggtgtggtgacacacgcctgttatcccagctactcgggaggctggggcaggagaattgcttgaacctgcgaggcggaggttgcagtgagccgaaattgtgccactgcactccatcctggctgacagagcgagattccatctaaaaaaaaaaaaaaagatacagttgtgaggtttcttgatgaggaagagcaagtcagaagcagtgaggggtgactgctatctggctttcatcatgggaaggcctgctctccttctgattcccttgccaggccatttaagatgcttctttgctcagaaaccagttgctgtctgcacattttcttctaatatttgagtgaaaggaagttcatctgaatagggaacttggagccaacactaggggactgccttaaaagactgttacctctttgaggggcctttttttgttttgtttttttaatacaggcttaaattaatcccaaacctttgtattgtattccttatttttaaaaataacttttattttgtgtgtttaaggcatacaacatgattgtaagatacatatatgtagtaaagcagttactatagtgagacagattaacatagtgatcatctcacagttaaccattctctaccccccaagaacagctgtaatctcatttagcagaaatcctgaatgcaatacacattattaactgtagtcttcctgttgtatctttagacttactcatcctatatatttgctacgttgtgtcctttgacctctacacctcatcatttcctttccactaccccaaacctggtaatcactattttgttttctatctctgtaaatttgacctttattcttttttttttcagattttacatataattgagatcatgcaatattgttattattttaatttttttctgtgatgtttttaaaatggtaaatatttctgtgtattggaaataagtttctctaaacaaatttttatttcattttataccatattttattaaattttaattgttaataaggattgatttggggttgttttagattggtaattccccctagtccagttgactgagagttaactgcaggatgaaaatggaccctgacagctcagagtgggctagaacaaatgccagaactacaggtaagggtgtttgttgcagcattggtggaaaagctaagatagatagaagagatcgttaaaaaggcattgctcaaaatagcttactagtatgggactgacaatttccattatgtgtatccataccgtggagtcctgtgcagtattttctatgtgatgcaggtctgtgtgtccttttaagaaaagcactgtgacagtagcgacatccaaaacttcttgaataatgtgatctcatttgagtaaataaaaggatgtttatgaagtctgtgcacatgctcttccttgtatataaataatttctagagatgatactcaaaaatcgttgaaatgttcggggagcgagaatagagaattttaaccttccatttttaaacttttctgtatagtttgattttactccatgcacaagtgttagttttatttttaaaataacagtcctaaaagtaacacttattggttatgaatgaaagagaaatttcagtaataaaacccagttaagttccttaattaaaataaatccatgggtgtggttttagtagctaggtctgttacataccttaagacccaggacatttcttttctctccctcctcccaggctttatgaaactatagttatttatttcatagatgtttaaaagtaggtcagcaacacaaccagaaaaagactctccgttggtttagggggaggtgggtgggagggcgctagcagaggacatcaggttggcttccttgatcttcctctgcctttttgtgtttgttgctggtttctaaccattttcctcccttttcccacatacattttgaagattattttagactgggcagtgccctaacatttttagcttttgccttctgtatttttacagcatgtttttagagtctgtttattttcttagtgtctatttgatcagttcctttaaattttatatctagtgctttattgcttcatatcctgcttgcttctgctatagtttagtgtgcatctgactttggtcattccgttgctatcctgttccatttatcccttttatgtttgtatttcagtttttttttttttaaatatctgaataattcaatgtctccaacccaaatagccagtgaaacttttctcgacctacctggttacgatggctgaaatgatacaagcaaccatcaggcaggaagggctctggttctcgatggtgtattattgttctgacagctaaaccctggcaggatgatgcctacaggctcctaatatggagcgcgaatgtttggaaatgttggaaaattacaggcaatggccctctttacatgggcttttcatgggaatagatgaattcatatacaaatattgcttaatgttttattttaagaggcagtaactctacaaactgatgaaatgtttacaacgtgttttttctgaacattaactcatgtaaagtgtttgtggttctcatggctcccatcatgggtggatgaggaagcagagcctcctccacattcaagccttctgactgcagggctccgctcccgcctgagcttttccttccatcctcgcttgtcttcacatcagtaatactgaaagtatttggcaagctgagcttctagaaagtgatacatttttggaaagattttttcctcctcaactatttagcattgtgaatagtttccccttttgttcctttcgccctctgtccctcaggccgtgttattttcaagaccttccattccattttgctagcctcccttgttccacatccatacctcccttctcatacttttcattccacctgaagagtgggaaatggctttttccattaatcctgccttgcttttcctgtaagatctagcaccaaacctccctcttcccagaagtcttgtctgacgtggtacatccaacttcaatcgtttcaaatctccattggccctcccctacagttctgaaagattctgtcttacacatggggtggtcgaggaggggaggcaggtttgtaatggaaatgatggtagactgagcaaggagatgtagcatctgcttcccttgtgctgctaaacggcatggacttggaaaagctgctcacccctcctaggcctgtggttctgcagctttaatataaaaggggtaggactagagaactgcgtctacagtagtgattttcaaattatgtttcaagaatctttgggactctacagttgctgaggtgaaagaaacctttctcccagcttcttccagagctgccctgctttcatcttgctggtgtactggggtttcacattcaatttttatctgtctgtctatttttgataaaagatattctgtactaatagttttaaaaccatcagattaaatgacctgaatgtggttattgtttcttacacatagttagctacttaataaatagttttaattcaacttagctttgatcatttagcaaactataaagatgatccctgaaagtttagtcttagctttgttctttagatgtttcttgtgtgtatcatctcccaatcgacagtcagtaaacttcatcattcccagtacctaagattgcagtgtgtatacttgtgtatactttattacccagcgtccctgagattacttaataaaggattttataggataaaagtagctccagtctttgtgtcctgggttgcctggagagtattaagaaaacataataaaattggttgaggtgtaccatacatgtatttatcttacatgaattcaactataagcattctgcaaataacaagaatataatgtggcctctgaacaccagtaactgctttgtctggtgctcagctgaataaaccaccgtatggaggaaaaactctccgtggaacttagtgacaggcagtacagtacagtttaaacaaagcaaagtatattatgccatatgcccggcttaagggcttttcacgagaaattctcactctatctggattttgccttaaatgttagctgtagaacctaacacccaagtaaagatatggtatcatcatattctatttcacttcattggaagctctttcccatgaaggattctgcagatttttaatacatggtgatgcttccataaagtactcctttaaagcatttgaaataatctgtttgaaataggagtatgaaaccatttagaaagcacctctctaaaggaaattaagtttatgaagtgaataagtgaactaatgtcatgctagcagcctgtgtagaggatctactgcttctgagggacaggggttatcggctaaaggaaggacagatctcttgatccctatttggcccttttgctaaccctgaaagtagcccaagagcaaggcctctgaaatgctaggacatttgacccaatcattattactacatttttgtatagtctcaatggagtctttaacatccatacataatagatgtatccatccaatataaattcaatgaataaaagcgcacctaagtaagactgtgtattgaaaaatgcaacgttcataagatatcctgttgggaaaagatatttttttacatgccaaaaatacaaattgagactttactaaactagattggaaagacagttctgtagagacatctggttccctgtaggtggaatttcaactcttaaaagcgagcatatcaacttaaatagtatgtgaactagagaatttagattttgaacctgctggttcaaacttttctgtgtttgccatcatcctcaggtaggttctcctcatcgtgtcaaagataggcccttggagaccaggagaagctcctggtctgtaccctacccatttgcacgcaagagtacacctctgtggtaatagttccagcaaaagtcccagggcaggctctttcattggcctgggccaggttctgtattcatccctaaagtggtcactgtgactgaggccactcctgagtcatatgctagccctggggttagctccgcccaaccacacagacagagctgagggaaggagtacactaaaggaaaattgagaagttttagttagaaagtggggatggattctgggctggcagaaagaacagatgttcctcataatgagcaattgcaagggctcatacaagacaagtttcagaggggctattgatggtgtgggtaaagaaaattatataaaagtaacacctcaacccgcggttcttccttgagattatggttccttttatttcacaatttgtggcattgctgggccaataaagagaacttcaaacagatattccacattcttttattggcacacagagggccatcaattaaccttattaaaaaaaaaacaacagtggaagaatcctgttttgaaatcttgatttgctttaaaagcacgtagatggttgttgacagatttttgttggtcctggggctgccacaggtcagccaggtgtttttttccccctgctggatacggatctttggacatttgcctccagtctttgcgttgaactcagcagtttcctgggtgaggaggcaacctttgtgtgctcagcttcttccaaagcagctgtctctagaagttgctagccatctcctggttaagaaagaagatggaaggtggtagggagaggaagcaaaaacatttcacactgcctccccaaagacagatctgttatcctgccttgaccacaaaaattcacggaggaagtcagtgagtcagagatgcgccagggtgtaagttgtcagcacagttcagcgagctctggtatcttgtgtttctctgttcgtaccactactgctttccttcctggctacattcaccagcatgaagaaactggagcagcaccttgagaggtttcatcagcccatggctgggatggttgacagatcacttgcaaagccatgggaaaaggacctggttcctcttgactcctctgacttattttcagtgatccgacatcttgaaaatattttccatttcactcctaggttcttgtaggccttcccacaatgagcacattcagtcttaaaaattttttttctgctttaattggcgtggggtcggatcgcttctccttgggtcttaactgtattcagaggggcttagggtttgcccaaggcctcaaaggccatgagtggtaggtcatggtcaaagcatgtcctctttcctcaatagcagtgttggcctaaattcattctccacttcttcgactctctttctcttgggtgatgaggaggtatgagataatgtgtgagaaatccttggccatctttggagtgaggggctctgtctatgtacctgtgtccccatccagaaaatacatagccagggttggctggtgctgctctcatcattgacataaccaatctgaaactggaaaccgaagcaccagtatagaatggtggccaagagggtggtctggtttcagacaacctgggttgaatttaggtcccatccctgactacttagaataattttatgccccagattcttacctgttaaatggggatgattttaacactgacttcatagagttctcagtgcatttgaatgagataatccattgaaatcaattggcatgatactttccacctcttgaacaccctataaatgttattattatcttaatcctggagctttatgtcaagaaaggagtttgccttttttttttttttttttgtaaaaattgaaaattttcaagataaaaaattgggggaaaatataaagaagcataatggatgatataatggccagtcatgtctcaccagtcagcttcatcaaatcttgacactttaccacatttatttttgaaaaaggaattaaagcattgctgattcatatcctctgataaagcaatgctagggtaaaggaaaaaggaggcgaaactgtttaaaacaaaagtgacttaagacacctaatgaaatgcaatgtgtggacttgggttgggacttgatttaaccaaagcaattatacaaagacctttttgaggccattatggaaatctcaatgtgggctgcctatcagatgatatcaaggaattattaattttgctaggtttgataataccatggtgaagatgaaaaaaacgttattagcttaaagaagataggaatttgtaggagagaagtttgtctttttaatgtttctactttctgcctccttaataaataacagtgttaccttggcagtttcatctgggcgttgtttctctcctctctatatcatcccccaagtctactgaattttgaggtcccagctggtgtcagagttttgctctgcaattgcttttttctggctcagtctgtgtgtccagttggagtgagtctgctcagaaagtggattcttccaccttgggaaccctgtgcatccagagactatgggacatattccttttgactcaatgtttcacttgggatctggcaaacatagacgtatctcttgagggctaggagtgccactgatggggccacattatcaatccctgcagaagaaaacagcaggaacaggctgatggcttgtgaaatatttttcaaatttcttccatacacaatcaaggaaaaaggaaaatgcagaagtggaggccccagcttctgttctggctgtattgtttgccttccaggcaaagagagtatttgtgtgagaattaagggaaagtgtctcactgtgagcccaatcccagaaggtaattccatatgaagtttattctctgcaggcactgttgtgggcgtgccagaggggagggcggagtatgggaggtgggcagacagcacttcctgcctactataaatccctggccagcagctggaaactccggagtgaggccttcagagaggaatgtcacctggagtggataatgcttgttgtcactttcaagccaaatttataaatatgtgatcaccaaccagatcaagatgtagaacatttccagcatcccagaaggctccctagtgcactcagtcaataccttcctcgctccccttctccctccaggtaaccactcttctgacttatattgccattgattagtttccctgttcttggtgcttcatgtaaatggaaacatataccatctactctttgtgtgtggctccttttatgcagtataatacctgtgagactcatccatgtttccatgtagcagtagtttgttctgattgttgtagaaagcatttcgttgtacagaacatatcactaattattcattcttcgattgaacaatggattgtttgtaaatttgagctattgtgcataaagcctctaggaacctttattttattttattttattttattttattttattttattttattttatttttgagatggaatcttgcttagttgcccaggctggagtgcggtggtgcgatctaggctcactgcaacctccgtttcctgggtttaagcaattctcctacctcagcctcctgagtggctgggattacaggtgcccaccaccacacccagctgatttttgcatttttagtaaagatggggtttcaccatgttggccaggctggtctcgaactcctgacctcaggcaatctgcctgccttggcctcccaaagtgctgggattacaggtgtgagccacctcaccctgtctggaatgttcttctacaggtgttttgaggccataagtacttatctcttgagtatattcctgggagtgggattgttggatcataagggacacaaatctttaccttagtaaatattgccacatagtcttgcaaagaggttgtacccattttcatacccaccagcaatgtgtgagggtttcaattgttccatgccctcacctatgcttggaattatccatctttttagttgtaaccattctagggcatgtgtgtatcgtagtagtagttgtcattgtcgttgtagtgtcacacttggtgtttattttcatttcctgggtgagtaatgatgtttggatatcttttgagaaataccagtaccatcttttggccatgttttcattgcaaatgtatcctttttataaaggtgattatgaacatcaaaagtcatcatggaaagaaaaatgcagatagagaggctgcatgtggcagcagtatcagctggttagtgataaagaacataggctttgctgcccgacagcaggagttcaagtcccaaccttgctacccactagtatggtattaattcactttctaatcttatttcctaaaccgtaaaatggggataataacagtgtctatctcaccagtgtgctgggaggattcaatgagacatgcatccttaaaatacctctctgtgaagcaacttgggccacatgaacagagcattaacaacacacaaacacaaaatgtagtctaaatgccctggtggtctttcttgagccatgcaggcaccttcctctgcctccctatattcagaagtgataaggccatgagctaccctcatgatttggtttcctaaatctgtaaagtctgctttattagctagggtgcaagttagtatttggaacgttttttgaagccatgagtgtgctcttgatagtcattattattataagcagcagcttggctcctttcctgcagagcagaattatcttcaatcaaatgacctttctgtatactttctactttaaaggattaattgcgtcttccttcctgtctccctcttcacttctccagaacgctcagcccaaaaccaaactggagttgcctttgtccctaagtggtgtcgtggtaccaccacacccaaagcctggctcagaatgaattcagcacccattccttgctttttaaacctcaaaagttcccgactcagtgaaaggcttccattttgctatcctcttctctgtctgcattttactctgtaatttattgacatagaagaggcctcgtgcaggctttcattgcattagtccacttggaagtcttttctccaatccatttgacctcaagctgcttttttgctgctgctgcatgtaagctagactgatccagctcaccttatgctgcttttgaaggctgaaaagccctgtgaccaaatgtttagcaggctgttcagacagtggactgatggtttgatctaagtccgtttcctgccttacacacacctccccatcccccaaggcaaaggtggaaaacccagcaagttacataagttgttggagcagtccagatggctggctgctagcccaggcaaactcgctttggagcacttggggatgcctgcactggcaatgaaacatgggctcattttttaatgagaacaatcattttgttcagctgtatgaatcccagtagtggagtgagatcagggctgtgatcccctaaacatggctgctggcttccctctggggcaggacagggggtgtcttgtagtgggagggtgtcttgtcctactgtttggactttactaaacaggaaggagcgggcagggctgcagaacaggaattataccattgtacagcctggcagtcctgtggaattggctgaatagcggaaggaaggaatctgaaaaggaagggaaggatctcaccacccagtgtgagccaattccagcctcgctattttatctgcccagtgactgatcttagccttttgttgtatacctttcttcttgagaggttttgaaatggtatgcattccttagctttgaggcaccatgtggctgcagttagtcagactagctccaaatcacaagcttggattgttgaacctgttttttctggagtgggaggaagatggaccagaaattgatgtgaggccctgggatcttcagtccaggtggccatgggtatggcttacaggatggtcatctctaggtctgactttccctgtgtgttgtcctgatgtgaccaggaagcagctgtccaagttgcctgtccacctctgatagcacatgcagccttgcatctggggttggtggttatttcgtgcaggtgacctgagagctgcctgggattgctgtgcttgcccagcccgccacaaggggttgccctttgttggctggtggtgtggaggaggacaggtcccctgactgccggctactccagtgcatctgaaatggagacacctgtatgtctgtgatctctgagccttatcttcccttgctaccccacggtgaattagacctaaagatgctatgctggttcgttgtttttttttgagatggagtctcactctgtcacctgactggagtacagtggcgcaatctctgctcattgcaacctccacctcccgggttcaagcgaccctcctgcctcagccttgtgagtatctggaactacaggcatgtgccaccacacctggctaattttgtattactagtagagacaggtttacaccatgttggccaggctggtcttgaactcctgacctcaagtgatctgccctcctcggcctctcaaagtgctgggattacaggcgtgagcctccacgaccagcctggtcctttgtttctattgttttcaaaatggtctgagaaataggaaaaatcccaaagtctatagaacatagatataaaggtacagaaaagagaatgcagattttcacgcatttttacatcgaaaaaataaactatattttttgactgaaagaataacatagagtaacaaacagtagaaaatgtggaaaataactaaaaagatgaagaggaaaatgaatatcactcatcttagaaaacagtggttaatttatgatatttgtgttttcaactcttttctatcattatgtgtttatatatatctagacacacatctattcatatataaacaaaacatgcatccctttccaggtattgtactttaagtaggattttcatttaattttttatattttctcatgtctgtcagtttagcagtgagttttgctgcaaacaattgaaaatccaacaaacaatggcttaaagtaagttttaggcattaatatatatgataggccacatgggacaaatagggtggctctgtgaagccattaaagacccagcttcattgtgtctttttactcctccttagagtgaggaggatcctttaggatgtaggcttttgtcttccttgtaggctgctgcacctcctggcctcacatctgtggttcaggcagggagaaggaaggcaggaagaggaaggagtggtgtctatgtcagcaaaacaaaggtttgccagaaatcgcctgtatatatccacttatgtctcattgaccagaactgtgtcatattcctaagaggagtgtgtgttttcagctgggtaaaatcttgctcccacatatcaagggtctgattaaggaagaaaaggaaacagacattgtacagtccattagcagtagctgtcacacttgtttctaaatactattctacaaccagaagtgttgagtgacttagaaactcctttgatgaaagaagaaataatattaagaaaattgtgaacactttcctcagagaagtatataatttgtaacattttgtatataagaaacagatctgtgcattcatctctcagtgggctgctatacatgattcttttcttagcgtaatgcatagaagtagatttgcttgatgaacatatacagtcacacaccatataaagatgtttcagtcaatgacagaccacacataccactgtggtcccataagattataatggagctaaaaaattcctatctcttagtgctgttgtagccgtcatattactgcaacacatcattcatgtgtttgtggtgatgctggtgtaaacaaacctaccatgctctcagtcatacaaaagtagagcacatgcaatacttgataataaatgactgtgttactagtttatgtatttactacagtctgctttttattgttattttaaagtgtaccccttctacttattaaaaaaaaaagcggtcagacagccttaaacaagaccttcaggcggtattccagaagaatgcattgttatcatagacgacagctctatgtgtgttactgctcctgaagaccttacagtgggacaagatgtggaggtggaagacagtgatgtggatgatcctgaccctgtgtaggcctaggctaatgtttgtgtttgcgtcttggttttttaacaaaaatagcttaaaaaggaaaataataataataaatacaaaaaaaacttgttgaataaggaaaaaatacttttgtacagctgtacaatgtgtttgtgttttaagctaaatgttattacaagaatcaaaaagttaaaaaaaattaaaaaggttgtaaagttacagtaaactaaggttaatttattattgaagaagaacactttaaataactttagtgtagcctaagtgtacagtgtttataaagtctacagtattgtgcagtaatatcttaggccttcatgttcacccactaatcactcattgactctcccagagcaacttccagtcctgtaagctccattcatggtaagcactttatacaggaataccactttttatctttttttttttaatttaagttctagggtacatgtgcacaacgtgcaggtttgttacatatgtatacatgtgccatgttggtgtgctgcacccattaacttgtcatttacattaggtatatctcctaatgctatccctcccccctcccccccaccctacaacaggccctggtgtgtgatgttcctcaccctgtgtccaagtgttctcattgttcaattcccacctatgagtgagaacatgcagtgtttggttttctgtccttgcgatagtttgctgagaatgattgtttccagcttcatccatgtccctacaaaggacaccaactcatccttttttatggctgcatagtattccatggtgtatatgtgccacattttttaaatccagtctatcattgatgggcatttgggttggttccaagtctttgttattgtgaatagtgccgcaataaacatacgtgtgtatgtgtttttatagcagcatgatttataattcctttggtatatacccagtaatgggatggctgggtcaaatggtatttctagttctagatccttgaggaattgccacactgtcttccacaatagttgaactagtttacagtcccaccaacagcgtaaaagtgttcctatttctccacatcctctgcagcacctgttgtttcctgactttttaatgatcgccattctaactggtgtgagatggtatctcattgtggttttgatttgcatttctctgatggccagtgatgatgagcattttttcatgtgtctgttggctgcataaatgtcttcttttgagaagtgtctgttcatattctttgcccactttttgatggggttgtttgatttttttcttgtaaatttgtttaagttctttgtagattctggatattagccctttgtcagatgggtagattgtaaaagttctctcccattctgtaggttgcctgctcactcttatgatagttctcttttgctgtgcagaagctctttaattagatcccatttgtcaattttggcttttgttgctattgcttttggtgttttagtcatgaaatccttgcccatgcctatgtcctgaatggtattggctaggttttcttctagggtttttatggatttaggtccaacatttaagtctttaatccatcttgaattaatgtttgtataaggtgtaaggaagggatccagtttcagctttctatatatggctagccagttttcccagcaccatttattaaatagggaatcctttccccattgcttgtttttctcaggtttgtcaaagatcagatggttgtagatgtgtggtattatttctgagggctctgttctgttcaattggtctgtatctctgttttggtaccagtaccatgctgtttggttactgtagctttgtggtatagtttgaaatcaggtagtgtgatgcctcaagctttgttcttttggcttaggattgttttggcaatgcggctcttttttggttccatatgaactttagggtagttttttccaattctgtgaagaaagtcattggtggggatggcattgaatctgtaaattaccttgggcggtatggccattttcacgatattgattcttcctatccatgagcatagaatgttcttccatttgtttgtgtcctcttttatttcgttgagcagtggtttgtagttctccttgaagaggtccttcacgtcccttgtaagttggattcctaggtattttattctctttgaagcaattgtgaatgggagttcactcatgatttggctctctgtttgcctgttattggtgtataggaatgcttgtgatttttgcacattgattttgtatcctgagactttgctgaagttgcttatcagcttaaggagattttgggctgagaggatggggttttctaaatatacaatcatgtcatctgcaaacagggacaatttgacttcctcttttcctaattcaataccttttatttctttctcctgcctgattgccctggccagaacttccaacactatgttgaataggagtggtgagagagggcatccctgtcttgtgccagttttcaaagggaatgcttccagtttttgcccattcagtatgatattggctgtgggtttgtcataaatagctcttattattttgagatatgtcccatcaatacctagtttattgagagtttttagcatgaagagctgttgaattttgtcaaaggccttttctgtatctattgagataatcatgtggtttttgtctttggttctgtttatatgctggattacatttattgatttgtgtgtattgaaccagccttgcatcccagggatgaagcccacttgatcgtggtagataagctttttgatgtgctgctggattcggtttgccagtattttattgaggattttagcattgatattcatcagggatattggcctaaaatacttttttgtatgtgtctctgccaggctttggtatcaggatgatgctggcctcataaaatgagttagggaggattccctctttttctattgattggaatggtttcagaaggaatggtaccacctcctctttgtacctctggtagaatttggctgtgaatccgtctgatcctggacgttttttggttggtaggctattattgcctcaatttcagagcctgttattggtctattcagggattcaacttcttcctggtttagtcttgggagggtgtatgtgtcgtggaatttatccatttcttctagattttctagtttatttgcatagaggtgtttatagtattctctgatggtagtttgtatttctgtgggattggtggtgatatcccctttatcattttttattgtttctagtttattcttctctcttttcttctttattagtcttgctagtggtctatcaagttttttgatcttttcaaaaaactagctgctggattcattgattttttgaagggttttttgtgtctctgtctcctccagttctgctctgatcttagttatttcttgccttctgctagcttttgaatgtgtttgcttttgcttctctagttcttttaattatgatgttagggtgtcaattttagatctttccttctttctcttgtgggcgtttagtgctataagtttcactctacacacagctttaaatgtgtcccagagattctggtatgttgtgtctttgttctcattggtttcaaagaacatctttatttctgctttcatttcgttatgtacccagtagtcattcaggagcaggttgttcagtttccctgtagttgagcggttttgagtgagtttcttaatcctgagttctagtttgattgcattgtggtctgagagacagtttgttatcatttctgttcttttacatttgctgaggagtgctttacttccaactatgtggttaattttggaataagtgtcgtctggtgctgagaagaatgtatattctgttgatttggggtggagaattctgtaaatgtcttttaggtctgcttggtgcagagctgagttcaattcctggatatcctttttaactttctgcctcgttgatctgtctaatgttgacagtggtgtgttaaattctcccattattattgtgtgggagtgtaagtctctttgtaggtctctaaggacttgctttatgaatctggttgctcctgtattgggtgcatatatatttaggataattagctcttcttgttgaattgatccctttaccattatgtaatggccttctttgtctcttttgatctttgttggtttaaagtctgttttatcagagactaggattgcaactcctgcttttttttgttttccatttgcttggtagatcttcctccatccctttattttgagcctatgtgatgggtctcctgaatacagcacactgatgggtcttgactctttatccagtttgcaagtctgtgtcttttaattggagcatttagcccatttacatttaaggttaatattgttatgcatgaatttgatcctatcatgatgatgttagctggttattttgctcgttagttgatacagtttcttcctagcatcaatggtctttacaatttggcatgtttttgcagtggctggtattgttgcttccttcaggagctcttgtagggcaggcctggtggtgacaaaatctctcagcatttgcttgtctgtaaaagattttatttctccttcacttatgaagcttagtttggctggatatgaaattctgggttgaaaattcttttctttaagaatgttgaatattggcccccactcttctgacttgtagagtttctgccgagagatccgctgttagtctgacgggcttccctttgtggataacccgacctttctctctggctgcccttagcattttttccttcatttcagctttggtgaatctgacaattatgtgtcttggagtcgcttttctcgagcagtatctttgtggctttctctgtatttcctgaatttgaatgttggcctgcctttctaggttggggaagttctcctggataatatcctgcagagtgttttccagcttggttccattctccccatcactttcaggtacaccaatcagatgtagatttggtcttttcacatagtcccacatttcttggaggatttgttcgtttctttttactcttttttctctaaacttctcttctcgcttcatttcattcatttgatcttcaatcactgataccctttcttccacttgatcaaatcggctactgaagcttgtgattgcgtcatgtagttcttgtgccgtggttttcagctccatccggtcatttaaggtcttctctacacagtttattctagttagctatttgtctaatcttttttcaaggtttttagcttctttgtgatgggttcgagcatcctcctttaactcagagaagtttattcttaccgatcatctcaagccttcttctctcaacttgtcaaagtcattctccgtctagctttgttccactgctggtgaggagctgcattccttgggaggagaagagatgctctgatttttagaattttcagcttttctgctctggtttctccccatctttgtggttttatctacttttggtctttgatgatggtgacgtacagatggggttttggtgtggatgtcctttctgtttgttagttttccttctaacagttaggactctcagctgcaggtctgttggggttcgctggaggtccactccagaccctgtttgcctgagtatcaccagtggaggctgcagaacagcaaatattgcagaacagcaaatgttgcttcctgatccttcctctggaagcttcatctcagaggggcatctggctgtatcagttgtcagtcggcccctactgagtggtgtctcccagttaggctactcgggggtcagggacccacttgaggaggcagtctgtccattctcagatctcaaactccgtgttgggagaaccactactctcttcaaagctgtcagatagggatgtttaagtctgcagaagtttctgctgcctttttttcagctattccctgcccccagaggtggagtctacaaaggcaggcaggcatccttgtgctgcggtgggctccacccagttcgagcttcctggccgctttgtttacctactcaagcctcagcaaaggtggatgcccctcccccagccttgctgccgccttgcagttcgatctcagactgctgtgctagtggtgagcaaggctccgtgggcgtgggaccctctgagccatgtgcaggatataatctcctggtgtgccgtttgctaagacctttggaaaagcgcagtattagggtgggagtgtctcgattttccaggtaccatctgtcacagcttcccttggccaggaaagggaattccctgtccccttgcacttcccaggtaaggtgatgccttgccctgcttaggctcacactccatgggctgcacccactgtccaacaagccccactgagatgaacccactacctcagctggaaatgccgaaatcacctgtcttctgcgtcactcacactgggagctgtagactggagctgttcctatttggccatcttggaacctcccccactttttatctttataccatatttttactgtacgttttctatgtttagatatgtttagatacagaaatactattgtgtgtcagttgcctacagtattcagtatggtaacatgctgtataggtttatctcctaggaacaataggctacaccatatagcctagttgtgtagtaggctataccatctaggtttgtgtaagtgcactctatgatgtttgtagggcaacaaaattgcctaacaacgcatttctcagaacatatccctgtcattaagtgaggcatgactgtatatttatctttgaagcttgctcttcatgaagactgtgccaatttatacttccatgagttgcatatgggaatatccatttccctgagcctacatctatactagttgctaccaaagtttaagaaaattcttaactttttcaaaaagtaaaacatattatcattgttataattaggacttttttttgtttttgaatattccctatggttattgaattctttttctccttttgcaattagtttatcctttgtacattttttttcttttggtgtattcacctttgagtgttaattactctttctgtattaaggctgtgagatactttatgcatcctatctttgtttgaatggattcccataataagataaatatttacctgagatttgttttggcatcaagatgtaaggtgaagaccaaccttgattttattcctccaaatgatttttattatcttaacactattgaataattaactatttcacaactgattcgaaaggctccaagatgatttaagaagtgcagcagtgattttttatttatttattttattttattttttatttttttttttgagagggagtcttgccctgtcacctaggctggagtgcagtggcgtaatctctgctcactgcaacctcctgggttcacgtcattctcccgcctcagcctcccaagtagctgggactacaggtacccgccaccatgcccggctaattttttgtatatttagtagagaaggggtttcaccatgttagccaggatggtctcgatctcctgacctcgtgatccgcctgcctcgcctcccaaagtgctagcattacaggcatgagtcaccacgcctggccagtagtgattttttaaagcacatagggtatgcaaagatcagctgccatacagagaccatatgaattgtcatccaagacattgttattttcatagctgacactgctgggttctgtgcctcgcctgatgcggactgcttaaccttcttggggtgagcacaactgtaagtgagcaatttaatacttaaaatgctgctagacagatggcaatttactctttccatatttgaagagcttcctgagtcctaagttctttatttttatttttattttttttgagatggagtctcactctttcgcccaggctggagtgcagtggcgggatctcggctcactgcaacctccacctcccaggttcaagcaattctcctgcctcagcttcctgagtagctgggttacaggtgcccaccaccatgcccgggtaatttttgtgtggttttttttttttttttttttttgagacggagtctcgctctgtcgcccaggccggactgcggactgcagtggcgcaatctcggctcactgcaagctccgcttcccgggttcacgccattctcctgcctcagcctcccgagtagctgggactacaggcgcccgccaccgcgcccggctaattttttgtatttttagtagagatggggtttcaccttgttagccaggatggtctcgatctcctgacctcatgatccacctgcctcggcctcccaaagtgctgggattgcaggtgtgagccaccacgcccggcccaatttttgtgtttttaataaagatggggtttcaccatgttggccaggctggtctcgaattcctgacctcaggtgatccacctaccttggcttcccaaagtgctgggattataggtgtgagccaccatgcccagccctaaattcatttttaattacaaactagattgttgattttttttcttttttttgagacagggcctcgctctgtcacccagactggagtgccatggcatcatgatcacagcacattgcagccccaacctcttggggtcaagctatcctactgcttcagccttcctcctaagtagctaggactacaggtgcatgccatcatgcccagctaatttctttttcttttcttttcttttcttttctttttttaagtagaggctaggactccttatgttgcccagatcagtctcaaattcctgggcgcatgtgatcctcccacctcacttcccaaagtgctgggattataggcaagagccactttttgaagttaatgttaactgaatctaagatgtgcattgacaacattttagatggccttggttcctcatgtcattcaaccagtatttattaaatgcctgctatgtgcaaggccctctggtctaccaggataaatttgtcaccttgcatttcagagtgaaaaacatcagtgtgaggtgtgaacatagtgctattgaaatagaacagatgattttagactgagggagttgaaggcagcttcatagaggagcacgtataggtagggcattgaaggatgttcacgggcagagatgcatagaagggcttccttggcaagaaatatggcaacacagattcttagaaatcatgggacagatgaggaaacagctagtagttgcatgtagatggtcatgaggtttgggaagggaaagtagaaaagtaaggtaggaaatgttggggccagcttatcagaggcctcatgtagaaatctggacattatgctgttaaggggtgacgcaaccataaaggatttgagcagaagtgatttcagagctgtggccacatgaagggtatgcagtttttgggaaggcagagagtaaccattgtgaaggcattccaagcaggaggtgctgaactcccagatgggactgttgggactgaagagaaagatacaatcatgctggaagcagaatccagttattgtcacctgattagatatgggagtgaaaagacaggacttaggacagatcttaggtctagccactgagataaaagtgatgccattaaccaagataatgattattggctgctgtttactgagcatttactctgtgccatgcatagtgccagctgctctgctgctgctaccttctactttatgtggtatgctctccattttatagatggggtaatgaggcacagagaaatgtcacaatgagaaaataacagttgctagatgaaaataggtttgacaaaaacaaacaatgggggaaggattccctatttaataaatggtgttgggaaaactggctagccatatggagaaaactgaaacttacaccttatacaaaaattaactccagatggattaaagacttaaacgtaagacctaagacaataaaaaccctagaagaaaacctaggcaacaccattcaggacataggcatgggcaaagacttcatgactaaaacaccaaaaacaattgcaacaaaaagcaaaattggcaaatgggatctaattaaactaaagagctcctgcacagcaaaagaaactatcactagcgtgaacaggcaacctacagaaagggagaaaatgtttgcaatctatccatctgacaaagggctaatacctagaatctacaaggaacttaaacaaatttacaagaaaaaaacaaccccatcaaaaagtggatgaaggatatggacacttttcaaaagaagacaaaatttatgctgccaacaaacatatataaaaaaagctcatcatcactggtcattagagaaatgcaaatcaaaaccacagtgagataccatctcatgccagttagaatggcaatcattaaaaagtcaggaaataacagatgccggaaaggatgtggagaaataggaacgcttttacactgttggtgggagtgtaaattagttcaaccgttgtggaagacagtgtggtgattcttcaaggatctagaaccagaaataccatttgacccagcaatcccattactgggtgtatatccaaaggattacaaatcattctactataaagacacatgcacacatatgtttattgaggcactattcacaataacaaagacttggaaccaatccaaatgctcatcaatgatagactggatgaagaaaatatggcacatatacaccatggaatactatgcagccataaaaaagaatgcattcatgtcctttgtagggacatggttgaagctggaaactatcattctcagcaaagtaacacaggaacagaaaaccaaacactgcatgttctcacttataagttgtgttctcacaactcccactcccataagtgggagctgaacaatgagaacacatgggcacagggagggaacataacataccggggcctactggggggtggggagcaagtggagggatagcattaggagaaatacctaatgtaggtgacgggttgacgggtgcagcaaaccgacatggcacatgtatacctatgtaacaaacctgcactttctgcacatgtatcccagaacttaaagtataataaaaaatgaaaataggtttgtggctgggtgcagtggctcacacctgtaatcccagcactttgaaaggccgaggtgggcagatcacctgtcagaagtttgagaccagcctgattaacatggtgaaactctgtctctactaaaaatacacaaaaattagctgggtttggtggcatgtgcctgtaatcccagctacttaggaggctgaggcaggagaattgcttgaacctgggaggtggaggttgcagtgagccaagatcacgccactgcactccaacctgggtgacagagcaagactctgtcttgaaaattaaaaaaagaagaaaataggtttttgtgtgcatatgtgtgtatgtgtttctgttcaatggccttgctgtcacctaactaaaagcaagtactaatttagtggcttgttcacaggttttaaggtgttacccctcctattgtcttgagaaacccttcttggtggttgtaggaaggataggtgctagatttgaggttaggggaaattcctagatgaagatggccagcaaacagttagaaatggaggtctgctccaaagaaaactggagggaggttggggttgcagatttagaggtggggcaccatctgcatggaggcattgttgcagctatgggaatggatgaaatttctaattgtggcttatagaaagagagagagagagatgagtaaagaggtccaaggaggagcttagggaatttttagagtaggctatggaactctcataatgtactgctggtgggagtcttaattagtacaaccattcaaaacctagtaaagttgaatatatacatatcctacaacagactgttgaaactactgaactctattgtagcacaaaaacagctatggacaagtaagtgaatgagcatagctgttttccaaaaaactttatatatatgcatttacatatattcatatatgtatattgtatgtgcatgtatatatatatacacacacgtatatatcctcattattcatggattccatatttgtgaattcatctactcaccaaaatttatttgtaaccctaaagtcaatacttgcagagttttcacaatcatttgtaggcatgggtagagtggtgaaacattttgatcatccactgtgcatgttcactgatggtgttgcacaggccctactctaccttcttgtttcagctgtcatactgtaaacaaatatcattttcctttttcttttcttgaggggttggtggggacagggttttgctctgtcacccaggctggagggcagtggctccatcatagctcattgcagcctcgatcccttgggctcaagtgatcctcctgcctcagcctcccaggtagctgggactacaggtgcatgccacccatgcctggctgatttttttttttttttttttttagtagagacaaggtctcaccatgttgcccaggctggtctcaaactcctgatcccaagcagtcctcctgccttgcctcctgaagtgctgggattagaggtgggagatactgcacctagcccaataaatgcccttttcacactccatttagtgctactttttttttttttcattttgtggtttcttttggtgattttgctaaagtggtccccagatgtaatgctgatatcgtgtctaagtgaaagaagtttatgatgtgccttgtggcataatatgaaaatacttgtgagatgaactttgttcaagcataaattataatgcagatggatatgagctcagtgaaaacaattcagcagcagaaattgaataaggtgatgtctttggacagaaatacacataaaataggattatatattgattggttgatgaaaatggaaccagaagcttgcaggaacctaactgtgtttctcctagaagcaatggtttagtgtttgctaactcagtgtttgttgctgtgttataaaatgtaactcctgcaaataacaaaaattgactctatatgtatgtgtgtatatatgcacttatatagatttcatatttatatttatgattgtatttgtatatttatatattccttttatgttaagattagtacagggcagaggaacctgtggagagctgtggagcagggctgagtagtagggccaaggagaggtggacatttaaaggacacaggtggtcagctatatcaagcacgataggaaaggacccagaagcagcctttggatttgtgcgttcatctgtcatgctctcaagacagacatgccctaatctctcccatcctccactctggggaggggaccctactgggcttagtccacttggttgccttggctgctggctgtgtttgtaaatgtatgttggttgctcaggtccggtgtgcttttgttctctctaaagaagaagcaagagaggcttggctaggcactgtgagcttttgatgtgaacatactaacaacctgtttcatccaggtcaactttaaaccacattgttcagtgagcattgttcagtgagctgtgatcgagccactgccctacagcctgggtgacagagcaagaccctgtttccccaccccctaaaaaaagaacaaaaaaaaagaaaaaggaaaagaacatttgtttacagtatgagaactgaaacaagaaggcagaatatggcctgtgcaacacgagacggtgagctagtctgatcagcagctttccaacctgctgtccctttcctttccagttcctactccctccaacatttgcaggaccttattcctagtcaactgtcagcagatcccaattttgctgtttgctggtaagatttgagatgttaccatcctaatgtatatatgaaattattaaagtgcatagagagcccttcaggacctaaaggggttcattcatgatggtgaaatattaaaaattatagggactaagagtatggcatttcaaagctggtttgtttcaggccccccttttgatgccttaggaaattaagatacagagagacgaagaggtttgatccgggtcccacagtaaggcagtgactgattagggccactatacttgttagctcccagggctccctgcccattcaaatcatagcttatagatggccatgtagttaggtgagtcccctgaaaattagcctcgagcatatagatctttacaatgctcagcacacttacctgcttgtccttttagctgagggggtaggaggcagatctcagttttattaatatagtgagggttcccaaaggatatatgaatcaattttataatatgagaactgttttgggggaaggagaaagaggagagtgaggcgggttaaggctactttttcctaaatttgtatttaaaaccagtgagtttcaaatctaggttatgactcagaagcacctctaaataatgtttataaactaggctaactagggggattaattcaaggtgaatttttctttctggctgctgtgggggttaaaaaaatatcaaggtaggttataaacataaaatctaaaactataaagccttcagaagaaaacataggacaaaatctatgcgatctgggattggcaaaagttatgtaataggacatagaaagtgatagccctacaaaaacatgaaaaaaaattgacttgatttaaattaaaagctagtgcttatcaaaagacaccattaagaaatcaactggcaagctgtagaataagaggacatattcgcaaaccatatatctgacaaaggacatatccagaatgtatagagaacccataaaactcagtaataaaaagaagaacctaactaaaagacagaaaaaagacttgaagaaacgccggacaaaagatggcccaatacatacatgaaaaagtatacatcatggatcatcagaaaaatgcagtttgagactataataagatactgctacgcatacccattagaacagctaaaagtagaagattgacaacacaatgaaaagattggcaagtgctggtgaggatgtgaagcaacccaaactctcatacattattggtgggggtgtaagtaaaatggcacaactactgtcgacaaaggcttggaagttttctgtttaataacaaaaaactctactgtagaatccagcagttccactcctaggtatttacctaagagaagtgaaaacacatgtcttcaaaaagatttgtacaaaaacctttggaccagctttatgatagctacagacagggaaccacctaggtgtccatcaacagaggaattgataaaactatggtatattcaaacattaaatttcaactcagaagtaaaaaggactaaaggtattggttcacaccacaacatggatgaatattaaaaattttatgctgagtgcaatcccattactgggtatataccaaaaggattataaatcatataaatcattctataaagacacatgtacacgtatgtttattgcagcactatttacaatagcaaagacttggaaccaattcaaatgctcatcaatgataggctggataaagaaaatggggcacatatacaccatggaatactatgcagccataaaaaagaatgaggtcatgtcctttgcagggacatggataaagctggaagccatcattctcagcagactaacataggaacaaaaaaccaaatactacatgttctcactcataagtgggagttgaacagtgagaacacatggacacagggaggggaacatcacacaccagggcctgttgggggatgggaggcaaggggagggagagcattaggacaaatacctaatgcatgcagggcttaaaatctagatgatgggtggataggtgcagcaaactaacatggcacatgtatacctatgtaacaaacctgcatgttctgcacatgtatcccagaacttaaaaaaaaaaatttatgctgagtgaaacagagtagctataaaagaatatatatgatgtaagtctgtttgtatagtgatctagaataagcaaaactaattgggggtgcaaaacagaacagtggttgccagtgcatggggtgtgtgaggggtgggagtaagatggaaggaggtctgagggaactatctgagctgatgtttctatcttgatagaggtttagcttacatgggtatatgaaattgtcacaattcatgattggcatgcttaagaattatgtattttattgtatgtacattttacatttaaaaatggacaaatattgaactttagatgatatgtgttctgaaatgtttaaaagtgctgatatctgcaactcctcttaaaatttattaaaaagcaagatggactgatggatgatagaaagatggctagatatgtgataaggcaaatatagcaaaatatgaacaactgtagaatggaggtgatgggtatatgcatgtttactgtctcttctttcatcttttctgtatgtttgagaatttttataagggtatgtggattgggagtaaatgtgctgttctggctggcctaagtcacactattcctggagtcggaagtggagtggattctgcctgtgatggaggtgggggacccacacagagtgcagaattctagaatctacagttccattttagaaacctcattctgctccttgggagttgtgggagaatactgagattctccatgtgatcacagtgctggggataccctttactgccagctcaaagcaacagaataaaagagtgaatattctcagaatctcttgttgcatgcatacgagttggcatcaagattatttttggatttggggtaggaaactcagcttcgagtcatagatctagaaatgcagtcctctgaactgacagctgtttgtggcaagggaagaagtcacctttccctgtgtctgtgttggataacataacattcaccttctgcctctccaaggggcattgtggggatgaaggcgatcatgaacgtgctttgagtttgtctgactgcatcagcctcgagttgcaatgaagacagctatgcatgccactgcccggaacctcctggaagaagggactggaggttgaaaggagctgcatagtgctgtgactcactctctgcccgttgtttctcctgggctgggacccacttgggcagcagaagagccttatgagctcctactttggtgtgctgcataccatcccgaggaatttctcatatgcagttttctaaagcacaaaagagcaaggttctctcttctgctaacagagctgtataactatttccaaaaacactgggttgggggttgggggttgggggttggggaggggagcacataaagacattctctgtttagtatttcagtttcttttgggaggatgggaggtggtctctcctctcaccatgaaaacggcatgctgacagatgagtgggttcacatccactttttaatgttgcatcagcctgaagccaggaagtgctagagccgtaagactcctcacactgtgacctggccacatcctacatacatgtcagcttgcacgccatctacttaactgtcatgcacttgatagcaaatgagcttttgccctttctgctgcctttaaaaatttcctgaaacacttttctgacttgtacattacttagatttctttcttcctcttttgcatccagtttttgtttatgttggctgtgactccaatcttcggttgaaagctagggaagttgcttataaaggttttcaggattgctgaatatgaaatgcaaggaaattgcataacattgcagcatttcctcctcttgttgcttgcttgttacccaaaatacagtagttccttctagaagcttgaagaaatttggcagatcctaccctctgatggtctattgtggtctagagagtcagtgttatcctgatttgaggttgaatttttcttaaggtcaaacaacaaagcttcctgaattataactatggcaacagtgtttatgtaacacacaaatcaaagtcacggggtagcggaggagaagcacccacaacaatcagtgttaataatcccagaacagttagcctgtgcctaattcaccagaaccaaaaacaagttaaaataaatggcctactccttcactggttattggggtgtgacctaccacctacatgctccaggaggagctgtttcaccttttctcttgaaactatatcagcttaatttgaaatttctcacagagaactgcggtaagtgccagtgacactcaaaatgtgaaagcattgccataaggataatttgctcatcaaggtcatcatgacctgcctctgacctgcagagaaagacccagacgaaggaatgcgcatccttaagccccttgtcctttaatgaggaataatttcttggacactgaatatatgcaaacatttagatgccgcatagatcacttcccctaaaccctgccccatagaaatgtaaaattaaccttgattggagattggaaatgataagaatgaaaaattttatttggaagtattaaattctgtagaatatagactgtaggagcagtaagagatcaaagaaacgagagattaaggttgtctgcagccatcaagtaagttaggaaatatttgtggagtaaggaaaagggaaataacgtttttgagcacctccagtccctgtgataactattttaaattctgttaatactctcataagtattattacttagctctactttgcaatgagaaagcagactcggaaatgttgaatgattatctaagggcgcatagttcaaaagtggtagaaccaggtgacaaaataaaaacttcatccagattaaatttaaaggagtttaattgagctatgaacaatttgcgaattgggcagcccccagaatcaccacacattcagagagactccagggatgcctcgtggtcagaacaaatttatagacaaaaaaaaaaaaaaaaaaaaaggaaagtgacgtacggaaatcagaagtaaggtacaaaaacaactggattggttacagcttggtgtttgccttatttgaacatagtttgaacactcatcagtgtataagtggttgaggtatggctgctgggattggccaagactcagctgttgttataggtaaattttcctaagttaggttttcaaccttgtctacctattaagttaggttacagttagtccacaaggactcagatataggagcatggagtccttctcaggccatatttagtttgctttaacacagaccttaatgccaagtttccaaagccacagcatgctccatccaccacttgactcaacttcatccaaatccatttctccctgttttggaatctgtccagggcctataccagtgaaagggttaggctgacaatgattaaaccccaaatgcagcgaaattaatcagcccaggaatgcccgggatgccttctagacagaagggggcttaggtctgtgtgtaagaggatgctgggtcagcctcctgctttagtggaccatgaagagctcctgtcagtcatttatgttcggctgaaatctgccttcctggggactccaccctgaccttcatctctgttcagcacaataagatttcccctttgtcacatcactgccctttgagaatctgaagactggtattgtgatgttttgaagccttctcttctccaaccaacactgtggtttagggaaacacatcttgcagagcaagtgagcagagccagagggtggagccaacaagaaccaggatatagccaatgtcaaggtctaggtgagaaggcaaaaacaatctgaccttgggcaatagaagaagaagtggggatgaggaataggttcaagacatatgaaagtaatagaagtgatacaactaggaactgattggatatgtgaggtagaaggaatgggaaattcaaggatgacagcacagtttctcgttcaactttgttgcacatttttctccttcactctagagttccctataaagcacaagtaggcttttctgtcatgcacttaaaaaaaaaattaccacaacccttgtctgtgagcaacagaaacacaactaaaaaataaaaagtatgttattgatatactatagaaagagcagggatgagcttctgatatgttaagataaaagggctcaaatgataccatcagaatcccatgtcccttcattcatggccctgcatttctttgtttgaccttttctgctcaaggctttgcctgtgtggtagccgaagttggcctcaaaagcttcaggtatgcatcctgttttcctagcaacacaaggcctcatttcccatagttgtaataaaaaatgagtgagtgtcatcggctgagtttggcttgggccaatcatatgtgcagtaggatgcatagtctggatcacatgcaacaaacctgaagatggagttgggatcagccccacccaaaccatatgaacttgccttggcagggaggtggctccccaaggaaaatgagggtggtatccctggaaaaagaggtgcatggatgttgaacagtagtattcacgggtgtccagagcacttttttcccccaatgttactgaggaataatactaagagataagttgcttatatccacaaggtacaaagcaacaggcaatgcttgaactaatggaaaagaaagtttatttttctattcatcatcattgttgtaatcatgttttgaacagcaagcagcagtttttattcaccagcaagaacgcttccggggctgttaaaagactctgtcttttggatggctgtaggagcacagccatttggtcactttttattgggccattttctaagagactgcctagtcttgagatgcctctgattgtgtaggggaagggactcggcaccaacaggtacagaacccctttcttagcccttatttcagaactccccagtggtaccataggcttcaaaactattagaagcattcgttgtcacctggtggatgtagagctaacacacaggggtggaacatagaaaataaatggctatgtgagggattttgatagccttgagttaagccaaataagataaatctgtatcctgttttctcttaggaaggcctgaattgtctgtttccactcccttgtaagaaagattcatagagaatttgccaggtgttggggagaacaaagcggtcacctggacacctgagcacacatctagctttccttttctgtctggccaatgcattgtcctcaccaactccacctttagtgttttttcttttttttttttttttttttttaattgcagtttctctcttatgctctctatttatccaatcagtactttctgagtggctggctatgtgctagttactgaaccccctttatgtataattctacagggtaagagcaaggtcttgacattggttcaggaatcggtctttgggaagtgccatcaactatatttttattggtttcacatttgagggagcctccctaagacagcaagtacaacagtggtagcagtggaaagggaaagcctggcagagtattgtcagctgagaaacagaaaagtagcaacagccatcttatttttgctccactgagcacatttcaccactcagaccatggtgatgagagtcacatttctgatgggaggaggaggaagaaccaatagctggctccctggctctgaccccttgagttgagacacatccttatttactccaggctattcatgcttcagattcaaacaattccttcccaaaagcttttccaagtgtggcctgtggcccatgggtgaaaagagaagtcctgatctagaaaaatcatgtccattcatgggtggcattccacagactaagggtgtcttacagtaacttctcaggggtgttattaaaagttcctaagcctgggcacagtggctcatgcctgtaatcctagcactttgggaggccgaggcgggtggattgcctgagctcaggagttcggtgaaaccccatctctactaaaatacaaaaaattagccaggtgtggcctgtagtcccagctgctcaggagacaggtgaatcgcttgaacccaggaggcagaagttgcagtgagccgagatcgcaccactgcactccagcctggttgacagcaagactctgtctccgaaaaaaaaaaaaaaaaaaaaaagttcctaaatttagcctgtattagtgtttgccgagcattctaatgtgttcaactgagaaatctgccacagagtctttggcaaccctggccagttctctctgtatgtgctgataggttttaggagggttgttttttgggcatcctaaaatgtctcaagctggttgtggtttttaattactgccacacttgtattaattggaagtttgtagaattcctgttatgcttaaattgggtggaaattttgttattacataatggttgcattgttgccattttaattactgcttagcctcttttgagttctttgttaattggcaggctgtttttcctctggaaagcaggactgggtggagaagttgtatgaagttgtggctgagtacagactctactgtgctctgcctaaatcgaatcctggctctgtaatttgctagtatgtaacctttggaaagttaattaacccatatgatgctatgaaatagaggcaggtgtagtaccccataggcttgaggatgaaataaaatcattcgtttaaacgcttagtatggtgtttggcacataattgatagtgaaaaagtggttggtggcaggtggctatttttatgtttgattgctgttttaaaaaagattaagaaccattgatttaaacgttgaccttagattgtctcctttcctttcccttcatctcttaattagtttcagttggttatattacattgccaacaagaccaatgccacagggtccctcaaatgacatttcccatccttagccatttatcccataggggatacatttccatcaccagaagaggctttttgttttgtttttttaaacacaaagtgggaagagaaggaaggaggaaaatgacagtgatgaagatgaaagttaatccttatagaatgttcaataggccatagaatttacattcagtgctgtgttgaatattgtatatctatgattccatttaattattacaacaatcctaagtggtggagagtgttactatccccctttttcagatggcaagactgaggtctagggatgataactgatgtgcatgttagccaataaacagtaaagttggactttgaacctaagcagtagattactacaaatctgtcgccactgacagacacaattcaaaagagcaagctgttttgattctagtgatggtggacccactttgtcatgcagaggagatgagatgatattcgatggtgtagaaccagcctgttgttttaagatgttgacacattgccttattcagtgtgtctccacattggtacatcaggggaacagccaggtgggaggagacttggagaaaacctcaggggatcatagagtttggatgtgcatttgggtaaagatggtgcagtttagagaggagcatcagttttaaacaaatttccttatgaacctatttccccagcatctttattttgtccagattttgatccaaagtgtggtatggctaagctctaatgcagctgtgtgtgaaagggaaaagttagattgttttgtcaaatttttgctttacttatgtctttaatatctacatttgaaaaacaagcctctctgttttctcagtatggcttggataatggtaataaaggtactcatagaaaaattctgggaatccagatgactctgtgtattctctgttaattctgtagggacatgtaaactgaactggctcagcagtgaacagaatttattgcaaaatcacatcttggtgcagaggaagcatatgaaggctttcctcgccctcctttgatttattaaattgtactttcattgcagcttctgggtaaggactcagaattgcagtgccctgtgatttgtatcaaagagctactctccccccctggtgtttatcgtcaggatcgaaccctgtggttcagagagaatatgaagtgttacttctatactagatgccagctggttgcatgggttggtggtaaatactccaggctagaatcagaaggctgttcccagtttcattttctttctgactcagggcaagttcttccttccggtgattcacctgcccagctgcccacaacatctcacctttatcatcgtcagcatcatcatcgtcgtcattgtcatcatcgtcatcacaatgacttattgatcatgtggttagtggttaagtgcttgggctctggagacagaccgtgggagttcctgtctggactctgcccatttccagctgtctgaccttggccatgtgacctaacttctctaatgcctcagttttctcatctctgtgaaaggaataattaggctggtatgagaaccgaataagacaatgcacacagaatgcttggcatgatgtctggcacatggcaggggttttgtcatcatcatcattattaatttctatctgtcataattattctttaatgattcttagatggaccgtgataagataaagtaaacacatgtaatttctcttcttcagaagcatatacttgaaaatagatacttgttggcacggatctttaacaaatcttcatatacaatggtcagtagaaactagactatacctacatcaaagtatagaaacccaaaggagataatgttcccaagttttagagtactcagatagagcttagcttcagttgggttgttgaaggtgcattaactgtttcagtcttctgaggagccacagatcaggcatttagtgccccttgtccgcttgggttgctcctggagagttgagttctattgtattaaggtagatgctctcaagaggcttacctgaaagcatataaatttgagattgctaatcataagacaaagctatggtcaaagtgatctttcaggacattgctcttgcctctgaacctcagtctgatgctagtgggcaactgtgagatctgtagaagaaggatagcccagagcagactgaccatttctaaagggtgaattgcatgctctttgcttctgtcagtatagaaggtatttatgaaccataataccaaccactggagtgacttggtagtgatatacatttgccactgcctagaaaggtaaaagggtattggaacatccttttagaggcaagatagaatagtacaccactgaccagctctgtgtccttagacaaactgtgtaaccactctgggtctcaggttccatatctctaaaatgtgaataatactagacctcatccatatggtggttgcaaggattagatgttgccatgtgtggtgcttggtaagtgctaggtaaacaaaaccattcctgcttagtgctgtgactgagccaccatctggttgcttccccaccctgggccttctttgttgggccctgtagtcacaaagtcctggtaagcaggatttgttagcttcatttcaaaactcattctctttggctcattaacccaaaccagacagagattaacagcctggcctcagaggagcaggtgagtacatgtttctggtgcctttgactcattgattatccttctccaattcagggaatgcttgggtgttccaggaaggggtctcccgagacccaggaaaccttgaaagagagtaatttggcacaaattcatctcctaatgaaggagggctggaagtcctgcattttactattccttctggattttgccagctataaatagaagcaaggttcccttggatagaatgtttgaatttactaggagaaatgcagggatcaaggatggctgaagaaaaatacttgccaaagtgtggtcttctcttctgcacttcccttgcccaactttccaaggttagtgaatgccggtcagcatggattgctggtcttagctattacactgtgacccatttcactcacaggtcacaaggctctgcaggatcggattgctgcccctctgccctatccttatctcctacccctctctgcattgcactgattgctaatcacactggccttcttccttcaaatgcaatgacttttcaccttccaaggacctgtactttctgttggcactagcccccacgtcttcccaaggaggtacccctcatcattcaggcctggcgcaaacgtcatctcttccgagaggcatttcctcgcctaaagtccacaataaacccccgctttttttttttttttttttttactttctccaatgtacttatcaatatttgaagtaatcataaatgtgcatctgtttatttctgttttcttcagtaattggaaagttttatgagagcagagattacagatgtctagttcatctgtatccccagcacctggaacgttgcctgaccattataagcacacagtaaatatttgttaaatacatggataagtaaacgaattgcaagcaacatgggaaattattatttaggaggtcttcaaacttttcaaagccgctatgcccttcctcaatagccacatgagtaaaatggataaaagccaagggaggggtcatttggtcttagcttctctccaacccctttgtttgtgcaggtgctgtgtggctcaatttggaaaccatgatctagctcaagttcatttatatagatgataaagatgctgctgagggagagtgggccactgtgtttcctcttttaagtagaaattacacaacctctatgtcagcctccacctagacttcgtggtgacttttgccctcccctcaaattccatgaatgttaagcatttcttttctcagtagtagagtccaaagcgcttgcattgtgttgtgctgtttcagtatatttctttggcacagtctcatttgatgttcacatcagctctggctgagttagtcagaaaaacctatcatcgcccacattttatagatgaagaaattaaagttcagcaagatgaagttaccaatggggaagcccaggccaggatcaaaatcttttgactccttatctctagagcgtttaggtatatgcattgatgccttttcattcattagacaatcctctttaagtacagaaacctgttctctttatactcatctttctgacctttaataagtggcctggtagctttagttttctttagaaaattaataataaaatgggatgatttgttatatttagagcttgataattcaaagaccttcttgggcgactccttcagtttatggatgaggcaatagatgcccagagaggctaagagacccagtgacacaaagcagctgaagggccaagtgggacctcttgaccagccattctccgtcatatttcttaagtgaaaaatccctttctggatttaatggttcttttcagaggtagttgccttggtttctttaggggttaaataagtggttctcaactgagagtagccattagagtcactggagggatatatttatatacatacatacatatatatatatatatatatatattatgatcaggttcaccttatgcctttctatacctacagaaccttaatgaccaaagaagggcttgggttctatgattttttttcatttatttatttaagacggagtcttgctctgttgcccaggctgaagtgcagtggcgtgatctcggctcactgcaagctcgacctcctgggttcatgccattctcctgcctcagcctcccaagtagctgggactacaggcgcccgccaccatgcctggctaattttttgtgttttttagtagagacggagtttcaccatgttagccaggatggtctcgatctcctgacctcatgatccacccgcctgggcctcccaaagtgctgggattccaggcatgagccactgtgcctggccgatttttttcttttctaaagtagaggtttcatcttgtttaattatgacagcatatcagagatgggcaaactgtgatccaaagactgaatccagcccaccaccttcttttgtagagcccataagccaagcatcatatttacaaacaaatatctataattgactttataaggaatactaactttgagtaccaattaagctaaatatcaacctctcttaaaaaaaacttattcttctgattagtaggcttgcatttcagaaaatcatactcaaatattattagtttttaaattttgtcaaaaaatgtatgaaaatttactttctatcttgttgtagaagtacctacataatgtcattgattttgcctcttggcccacaaagcataaaatgttaatgtctgacccgttgcaggaaaaacttgctgacccttgcaatatgtcattgtctcttttatattgggcattttctttttctttattggggtactttccctttttgtgatttacattatttaaggggtttctatggaaaatatatattctccttataacattcaaatttctagaagtatgtagagtaaaaagtaacagttcccactccccggtattaacagtcaacagtttttgatgtaaaggtcctgactttgccactaactagctgtgagacattagttaacccctctaggcttcatattctccatctgtgaaacagtgataataacagctcctgcccaacagaattgtcatgttgatgatttcagatcattcatgtgaaatgcttagcacattgcctggtgcgcagttcatgcttaatgatttgtaactaattttaatttttttctcttttctatttatgtacgcatatacatttacttgctttcttaaaaagagggaatttttttttacacaataaagttgcacagatgattctgatgcacacacacttaagaacagctaaagtaaatactgagaagtagataattattgaatgggttcatgtttgggagccagaaattaccttccacttcatggtgcaaactagggaaagtgaggaagataatggttttctacagtgaacctatagggtggcataaaatgcacataagtgaatttttatttttattttccaggtctacaactcgaacaaagacagccagagtgaagggagtaagtacgatgcttgggtaaccttctacagccagggttgggagtaggctttgagaagttgctactccaggtgtgaaccaccaggcggtgctgtgggcgtgttgggttggctccagttcccgagtgcagtgggacatgcctccaccccaactttccgccagtgactccagagggacggtaagtgagcctggctggcaaggctgtagtgtagtgacaccttgcattgaaataatgggtcacactttacaaagcattctcgtgtacattatctcctttaatcgtaggtcttaagactatagctcgtcaccacttaaaagttacttaatacaacaatactcaactcctggagagccttatcctgtgggaaagccaaagttgctgttgcctccagcacggtctcgctcaaaggactggagaggcaataactatgttaggtgatttcttagtaactgttttctttgtggtctcttgtgggaggaaagaatggagatgaattctatggtaatattcctctctaatggaagtgtccctgggcagcctctgtagactgtagtgcatttgccctgctgctgcctgtaagcactctggttaatcatgatttccaagggtacctgtaaccttgtaaaggcaatgggattaaaatgaacctgcaactggtagaatgtttgggctgattatctccttggtgtataggagaaaaaacaaaatccttccaggttgctgcaagagtacaaaggaaatcctgtcaccttgctttgtaaaatccacttgagaaaaaatttaaaggttgccctactgtgaattccagttgtgttaggaaaatcagtagaacagtgcctctccatgtggaccaaaggatgaagttgtttttttgtgaaagccattacaggacagagatttttccccccctttctttctcttcaaaatataattttttacccaggagttttgtatgaaatattaaataatttggaatgcctgctgtgggtaggttgagaggcctttatgagatgaaaaaaaaatgttcccctccacctccaaaaaaaataaaatgagcaagggaaaaatttcaagtaaatatgcaaggaaacaaagaagtaattccaccctaccccacccttaattaggtaagattgttttagaacacttgaagtcaactctgactaactgaggcaaaaacaacagtaacaataatgaaggaatatgtaaggctgtatggtagctcatagtaaggtcagaggagctgaaaagctaggcttgagaatagatgagttctggagacctaggaacccggtgagaaagggtcttctggataatacgacaaagctctaaactgtttgtagtccttgcctcacctttctgaacattgagatttccaggcaacaagttggtctaatttgggtccacccagggaaaaactgtacattttgattgagagtttcaagactgctgcaaaaaatgggaacagagtagtttcccagagggaaatcagggaagccatcaggaccagaggggatggatgccaagcaggctacactaacagatactcacacctggccctgcctgggacacattgcctccataataaaggacccaagagtggtggggtgggggaggagaggcacgtgaatggagacctccccctacaccagccagaagtttacttttaacttgtgaccttatgaacctacatctctctacttgggataaatcccaatagatttgaaggacaaccatggttctagtggtgggcatcccaactggttctgacatttcttaaggcatttcgaggatatgctttggaatccttaaaaaagtgaccaccctctaactccccaatggcttatcctaaagaaatcattagagtgcaaagatagtttgtacaacaaataaatttgttggggcgttggtgataatagcaaagaatgagagacaatctaaataccaaatagggagttggctaaataaattaaggagtaatacacagcctttagaaagaaccagagagggctggatctatttgcagaaattgtgctgatagtttgttaatgattgaaattttaaaaaaattaggctatagaacaacatacataataacatgcattacttgacctccctcaagaaaagaataagacaaacagttttattttggaaaatataagcagttgtgacattttgctttttgcacctcattattcacagagcaaagagagttgcttgccttgggtgtctaatgattcttcagtcattaccctttcatctagcacacaggaggtaaaaagatgggttaaaaaaattggtcacttttgccagcacggtggctcacgcctgtaatcccagcactttgggaggccgaggcgggcggatcacaaggtcaggagttagagaccagcctggccaacatggtgaaaccctgtctctgctaaaaatacaaaaattagccaggcatggtggcacacgcctgtaatgccagctactcaggaagctgaggcaggagaatcgcttgaacctgagaggcagaggttgcagtgagccaagatcgtgctattgcactccatcctgggcaatagactgagactctgtctcaaaaaaaaaaaaaaaaaaattggccactttttcaggagtcatttaaataggaattgtttttttagggtattgattgatttctaagctggcaaaccagtgtgatggtctggtttagtgcttcctcacccttttttgagtttggaccctttcccacatggtacaggttcttagcttcccctccttggtggggttgttttactgtatctcttgattgcagtaatttacaatttaatgcaaaccccccataaggctcatctaccacaggtggcgctaatgctctgggtcttgattgttctgcaacactccttctgtttatgacacaatctaaactcttttaaagatatgaagccaatctgatatgaatttaagagtgagacactgctcttcttaaccagattccaaatgtctagagtccaaattccaaatgtccggcattttcttttctaggaaatgttttggtgggaatttcaatgcaaacattttatcagagagccagaatgttctgaaggagcagttaacaaaagggaatttctgaattcgtttgctttcatctcgaagtttctctcagggcatacggtgcctgtggagtataagacagggccataagtaatgtctgtcagctgctggtattttccaaatgacccagttgccagggagaggatggcagctgataaatatatgtacatttctttgcagagccttttcttctcctcttctctatgctctgtttggatctcaggtttagagagatgaattcatcacactcccctgttcatggcacattatcagcacaggtttcttgattcattcattctttcgtttcattttatttattcatccattcccttttagttcttttttctaaaatgtgtgtcttttatcttcctgtgttcttgataaatggtgtgtgttaataaatggttctgggtcttgttttatttcttactttgtgccctcatcattgtgtcaggagccattcgtattcctctgtgtccttttatgctgtggcttctgattactgcataatttgtggtacacagcactttgtatctgtttttgtagagatgtactccatcttctcatgcctccaactcctcatcagtactcacaccaccacaatggacatctttgtacatatcttcctgtgtgagaattcctctgggatacacccacccaaagcattgctggacaaaggctatgcatatacttagtttaagcactctcttgtattgttctccagagtggtcgatccgcagtcccaccaaccctacatgcaaatttctccattcctgccaactctcaccagtattcagctctctaattttttgccagtctgataggtgtaaaatgatagttcattgttgttttaatttgcatttctctggtaattaatgaatttgagcatctattcataggcctgttagtttactgggtttcctcttctgttaattgcctattcatgtcctttgcccatttttctatttcagttaccatcttttctttttgatatgtaaaaagttcctactgattctagatactaatcccttgttagatttagccagtttaaatatgttctcatcttgtcatctgtctgttaatacgtggtatccttctttgactataaatccttcaaagcccttttatatattcaaatcatctcttttttgctttcttgtttatgattttcaagttgtgttttggagaaggcctttatgacccatgtcacaaagatgtgtacctatgttttcttttattggctttatgagtgtgtcttgcacatttaagtttctaatctagctgatttccaccactgtatgagatgttccatgaagatccattcttatttttatccttgggaagagttagttttcctatcaacatctactaagctatccattcttccctcgattgatttgtagtgccagtgttcttgcattttaggtttgcatattttagttctgtctctgagccctttattcaggttttttgtgtagctgtttttgtcccaatacctctctgtttttaataataactttgaggcaactcttaatatctagttatataagtctcctctatttattctcccttttgaggtttgacttgggtatttatgagtctttatccttctgtataaattctataataagtttaagaagtttcccctaaaataaaatttttctttgcgagtgcattgaatcatacaggttatttggagaaagttgacacctttgtaatattaagtcatgtcttccaagggttttgaatgtctttccatttattcagaccaccagtgttttttattaggattttatttttctgcctagagatcgtgtgtgctcctggtcaagttaatccctaaatactaaatttaaaaaccaatattttattttgccagccctgctacccatggggacccttcctggatttgcttctagaatgtcaggaatctatatcagtgacaccagattctctaatttgtcaaactcttacctagtagagaagggaaggggaaaaagggagtattggtaataaagaagaagaaagtatgatattgtttcttcttaagcttttttttttgaggaagtggtcactgccagtgtcagtcacctagttatctgatacttgtcattgattcgtccctttcattattacaaagaacaagacttccctgggcaagaaccatttctcccatctcacccgctgcagccccgtttgctgtatctctcgatgtctttttgtctttttgctgttccctacctttgggtacaaggtagggaatatctttagggagttataaaatttactccccaaagactatgagaattggttcatttttctttgtaatgagtccaggttggaagcaggatgagaggcctgttctcagctcaggctgctattgtcctgccgtcccacctgagggaaggttagaaagccgagaacttgtcagagagaacacaccagtccagtgcaagggagtaagagaagggcaggctcttacagtgtgagttggtcttttccaagtttgatgttttaaataacaaatgtcactgcctacttaactctaaaaagattagcttgtttacaagaatgctgccctcccactgtttctccagctgcttgaaggctgaagtctgacagattgaggcagagagggctcagtctcctaatcttgactttatagtgccactttcctcaatgtgggtattaactcagattccataggttaatcgggttatgttgaaaggaatatgctgaagttgctgcaggcatgccttctcatgcatgtcaggacctggcttaacactggccatctggcttttcagaatgccattttgtagttcactccacttctcactcttgttcaacattttcctgttactcccacctggatcttgtgccggatgaaactgcaggagtccaggcttcctgtagctcttccttcagtgaatgcctctagaagttcttggactcctggcctcacgtgatccttccatcttggcctcccaaagtgctgggattataggcatgagccaccacgcccagccttctgggagttcttaagggcaggtggcactgagatatatgagtaccgagaggtaaggacactcataactagaacacacatctgtctctacctttaaagctcatgtgatctgctgtggaggttcagaccacaggggaacaatagacagatggcccaattacatcgtgtgggtgtatgtcatattcaaaccatctacagaagtacccagggtgcagactacatgcccagagctcatggatttgagagtgagctacacttgaaaaatggaaatttcctcccttctctcctccccagaagaagaaaaaatataacacttcctcctctttgcatccaagtcctagtcctttctttccttgtggtttgtttttaatctagtgctctagtgcttttttttttttttttttttttttgagatggagtcttgctctgttgcccaggctggagtgcagtggcatgatctccgctcactgcaagctccccctcccgggttcacgccattctcctgcctcagcctcccaagtagctgggactacaggcacccgccctcacgcccggctaatttttttgtagtttttagtagagacagggtttcaccgtgttagccaggatggtctcgatctgctgacctcatgatccgcccatctcggcctcccaaagtgctgggattacaggcgtgagccactgcacctggcctaatctagtgcttttataagaatcctttatatttgaataaaaatgctgaagaacccactgcagtttgccaatttgtcattcacactgggaggtggggagaagagcagtgattgaagaaggaaatatgaactcattgtagaatattacagaaatacagcaaaatgattttgaaacattcagtcaaaaatcattggtaatattattcccagagatacttccttcttgccttttttaaatgatgtcttgtatgtattttgtcaatgtcagtatgaattttaatttaactggcattatgttgaatatgcttgttgtattctgctttaaaaattacagacattttctgatgtcatgaaatgtttagaagtatcacctgtcatggttgtttaatattctgtcattggactatatcttaatttgttgaatcatttatcattgttagactaatgctctttccaggtttttggtattacaaataacattggcctatgttattcataatagcttcaaaagttattaatttcatcagttattggccttgtacatcagcctttgtacgtatctcagatcattctctttgggtagattccgccacgtggattagagagagggtttgcatggaggagtaatgtgtggctggtgtagaatagcatcctgggtgtagaactttggacaggtggtgcgcctctctaagcttccatttcctcttctgtaaaatggggataataatacccctgcttcataaactcattgtaagaatgaaagttcagcacattagtatctgcacattagttggtaagtgcctaattactcttggttattactcttatcatctggccaggccagttactcccacaacaaaaggaaaaacccactggaaaggaaaagccagctggattggtaacactgctcttgaagggaggaagacaacctgctactgtttctcagtcttggtgctttatgagtgttcattcatttaatcctcgttactgtatttctcaaagtggggtgtgcacaccactggtggtacactaggtcatttgagagagtatattttaaattaccatctagacttctgtatttattttgatgtgtattgtgggggaacataagttctctgaaatcccctgattttattttgttttatttcatttatttttttgagacccctgtcacccaggctggagtgcagtggtgtgatcacggctcactgcaacctccgcctcctgggctcaggtgattctcctgcctcaacctccctagtagctgggattacaggtgcctgctaccacacctggctaattttttttatttttagtagagatggggtttcaccatgttggccaggctggtctcggactcctgacctcaggtgatccgcctgcctcggcctcccaaagtgttgggattacaggcatgagccactgcgcctggccaatcccctgattttacaaatgttattgcttagcacaggggtccactttttttagtaaagggccagatagtaaatatttttatttttataggagtattcaactccgctatggtagtgtgaaagcagtcacagacaatatggaaatgagcaggtgtgggtgttttccagtaaaactttgttttacaaaacaggcaatggtgaatttggcccagggactgtagtttattaacccttggcttaacacaaggctaagtttttaaaattagtctaaatgggatggcatgaggttttgagagggagcatgaaagtgtcacacgatgggctgccatttgtacaaatgctgttcacagcaactgagtttccaaaggagctcacaggcttaaagaggtcaagggagcacagttgagaagtagtgaagctcatactcaaaccctagcctgcctcattgccagggtcatttttttcctgcaacacttcatatgcttgaaatctttgatccattctgccatcctgttcatatgtggtccacccatgggggctggaaggaatttcatcatcagactccaacatctaacccctctagttctttgtggctgaggggccatcccatattccttcttagtgcaccacctcattagagccctcagtggttcctcaaacacctgtgcacagtgctgggtgcacaagggtcacgcatttcactgactggcttccccagggtcagacccttagtgtggcccaccactctcccacagggatttggcaacacaacataatgctttatatgttgtttctgtacatccactcatccttctttaggccgtcattcagagcaaactccctgatggcgttttattcaggtttgccttgttttatgaggacaagattgaggaccaggagaggagatggggagggacatcattaccattgctctgtttcctattgttgtgcctctgactgtacatttccttcatctctgttcctcagcctcccttgatctgtaaaacagaaaaggagatttaggcttgaaaactgtagggaaagccttgatgggatcgcctgggccactatttttaaaagacatctaaagccttcagccattaccaaaaatccaccgtctcatgaaagcagcagagggcagaaaagaggatttgtttttcttttgcttctagtcacctttggccttttgctgttagaacacccacagttgagaggcaggaggaggcagccaccggtaaccaggatccttttgggatcagaaccatccagaggctgccaggcctctgctggtcggtggcttataaatagaacatttccccttttaaacctgagaagggtggaaggcattaatgggcacagtggcctggccgcctatgcactggcccacgaggcagtcagctgagtgcagcatcccctccagctttctctccaggcctgccaggtctgagctgatagaggacagacactctgcctccctcccttgcctgcgttccttcctgccctcctccccacaccctttttctttcccctttctcctctctcctgtgcatgcagtttccgtggccaccactttcatcttctgagccgcagtcaggcgaggtggtataattctagctctccctaggtgctgactttctacacctcacttttcattatgagttgcctgtgcaacacagttgctgtggtgcattgagcttgaattacatttagttgagctgtaataccccagctctagaatagccctggctcggagggcagggggctggagagagaagaaggggcaggaacagcttgtttttgcagatattttattatttgagttcccagctattttgtttgatgagaccctggcccccaaagctatgactggtggtggtactccttggacttgcatggataatcagaagcctttctgcttgtcctaaaagacacttgacaaatctaccctctctctcagctagctttagactggcagatgcagccagtgtatgcctctgccatggcctaatattcccctttccctcagtgatgtgggctctgtactgacagcaggctgcagcctgagcaggtgtgagccacccgttgccatcccagtttgggcttcagccaagagacagtgagcaggtccctggctacatctttaacccctaaagcccagtgcaaggggttattgagacagagactaaaatatttcccccactgccaccgagtacaggcttccagttattgtggttaatgtttattgagtacatactggggagtgggcaacatgttcactgcttgatatacgttatgtcatttgatcctcctaagaaccctatgagctagatactattattgaccccatttacagatgtgaaaactgagacttcattctgagggcaaacttggtcactccctgcactgatcagagttgtcagagcctgcagctcacaatcggcatgtaagattgagcagagggtagagtagtgcttagaagtgttagctctggagtattccacacgtggtttgaaatcccagcctcaagaattactgagtgtgtgattttgagaaattaatttctccaagcctcagtttctttgtctgaaggtgggaatagttttaataattaaatctttggtttttttggaagaataaatgagattaggatggacatcctttgctcaatggtgcctggtattatcggcaatgattaaatgttgcgctttattcttattaccaataatgtcatcattatccaaagccagagcccgtttatataaaaacgtggcactgtacagtctctttaaagttcctccgggcattgccttatttgattttcacaacacctgcatcttatatgtgaggggaatgggtcagagaggtgaagtatgcccagcttacacaagcagtttgtggagacaccagggctcaaatcttaggcctttgattctgaatgccctctctttccctgcccttcgctgcctcagagtttgttgtgaccaacaaattgttcttaaagcatttcgaggtaagaagacagataggtaaaggcaggaaagtgaccttgatgggcagaggcagttggttctctgtttgaaacacttccaccctcagaaagctgatgatgatctctttcggttgagaaatcagtgcaaaaccaccgggccttaaggcagaagggaattgaggccactgtgtaattcattctcagaatgtccagatccccatgtaggagacaaatggtcctgattaagctggtcagtgttactgcagtgtgcattaagccttgctcttttgctgctattctgatttggaattttaaggtggactaggagattgcagaagtagaaacccacaaagaaacactccttccatcccaggcagatgtatagtcctcagcctgtgctgtgcaagaacctacgtgctgtcaccctggatgcctgtcttttgccaagaattggaacactctttagaacctcccctgactgtggctgagagctggtaggtttattcccatccaggcagatttttgtttctgttcctgctacctattttactttactctatgtctctttcagcttatttttctgtgtgtttgttttcaagaaacaatgaaaaaaaaatagatgcctttgtatctggtaggctagggaagaaaagtctgactagcagtattcttgctttgaggtcagggtatgaatgagatctctgtcaaacctgtttgtctcatgcttcccactgcaggggcctgaactctagaaggtaccaatatatgcagccacctgtcactattcaaggctcctggaatgtggagacttttggcctgtcggctccttgtgttttcagctggtgaaaacatggattgtatttattctttcaggacatatttattgagattagtcatgaacagggcagattgtctctgctctcatggagcatatacaatgaaaagaaattgacaacaaagagtaagcaagtagataaaggtataatttctggtagagatgagtattctgcaaaaataagggctggtggatagaggataagggagaagggagtgattttagatacctggagcaggaaaggtctctctaaagaggtgacatttgagaagaaatctgaacaaagggagggagggaagcgtgtcaggagtgggtagatgagtgttattgatggagtgaccaacatgtgcagaggccctgaggtgacgtgagctacttgtgttctaggaatatcaggaagaacagtggtgcccggatgggaggaggccctgggggtgagtggtcaggtaggctggggctagaccatgtggggccaggagataagactgcattcttagtgtgaagagaagtcactggagagttgtgatcaggtgcatgacatgagctgatgtatgtttttaaaagatgactctggctgctggtggggaataaaccgtagtggggtgggtgggggtggggggtgggggcaaaattgaagcagctgggagactgctgcaggcagtccaggcaaaggatgatggcagcttggatcaaggtattagcaatggatatggtgaagagtagttagattctggatacggttttaagttattagtgacaggattggttaatggattggatgtggtgtgtgaattggatatagggtgtgagagaaagcaaagatcaaggatgatgttactggaacagaatatcttacaggtagaatatggtcctctcccatctcattctttcagccaggttgaacatagtgcatgtttggggacacattaggacttgagctccccaatttattatttctgtcaccttcatgattttttgtgttttttttttttttgagatggagtcttaccctgtcacccaggctagaatgcagtggtacaatcttggctcactgctacctttaccttcctggttcaagtgattatcgtgcctcagcctcccaagtagctggtattacaggcacctgccaccatgcctagctaatttttttttctttttttttttttttagtagagacaggatttcatcatgttggccaggttggtctcgaattcctgacctcaagtgatccacctgcctcggcctcccaaagtgctgggattctgggtatgagccactgcacctggctgactttttaaatatatacatatactacttttattattaatttgcttactggttttaaaccaattcatccattttttacctcagtttatttaaaaaagaaatatattttgctatgtgtgataaatcagtagatttctaatattcattaaaataaaagtataactgagaaatgtttgtgaacctcttggaatcatcccatatgccaaagtggaacaatccagcattccatattaagatgcatagcactggcaaatagttgttgtccagcagggaatgtggtatagatactggcaattgactaaattaagtcatttttgtttgtttttggtggtaataatcttaattgcttagtatatagtacagtgtttttccaagtggggttctcgcatgtactgatgcataattgccgggagagggcccagaatctgcatttctacaagtgcactcttgttcactggagttgagagccgctactggaatagaaatggtaggatccacagaacctgatccacagcccccagttcctttctgactgtctctagcagaaagcaaagagtagaagaggatgagcccaagagtcagactgagttaaataaaatcttggttccactactcactgatgctataatcttacagaaattccttaacctgactgagcgtaggtttcctatctacaaaatacggatgatgatgatgatgatgatgatgataagaaaatgatgcacctaactgtgtagctcagagcaatgtagtctgtgctcagtaagtgttagccacggttatcattgctgttgttaccacttaacgtgagtctggctttcctcatcataaaaacttagcagagatattgggaaaatcaaataaactatagtttattaatttattttataaactgtaatgtattatccctcattacactcattagtgtgaaaacacagtagttatgagtaagaagagtagcaagacttaccctatggggttatcataaagataacatgaacttgaatatgaaaagtatttcatcaactggaagatttcattcaaatattaggatatagtaacattctaatattggtaatactaggtaatattggtcatgatcatgtattgaataccaagtaaatcccagttgctatacatttcatttgaccctcgtagcatcctgttgagttatccccattatacaagcgaggaaggtgagcctcaaaaaggtgaagctaaggtcatatccagccagaggtagctgaggcagggttctaatccaggtctgtctggctttatagctcattcagtttccactacctacaattctgtctgtgtgactttagttaatattaaagttagttcacattccctgaacataccagccagggggcagagaatagtctggtgtagggatggtgcatgggggtccctggagtgctgatctgggattaaaaattggctgtgggtaacctccacaatagagaatgcacacccagataattaagaaccagttggccacctttcctgggccccactgaagcttctgagagctgctatcatgaggacagctttccaggggccacagcccagggagccctggcaaccctggggcttcacatgattaggggaaaacaggcaagcccttctagtcttccctctgtgtgtgtgaaaattggaaattattcttcaggtggaatttatgttcatttcaatgtgggtggttttctcaatggcttttaagggtgttgaaattgattaaattcagaatgagggaggccaaccaggctctataaagagcaaatcacattggaaaattgcataaatttctgtggtgagaacatgcccctgaagtggcctgctcacagcaactcgacaatttcctgtatccatccatccatccatgttagaaatcctttacttctcagttttttttttttttttttttttttttttttgaggcaggctctcactctgttgctcaggctgcagtgcagtggcatgatcatagcccattgtaacctcaacctcgtgggctcaagccatcatcctgcctcagcttcttgagtagctagggccacaggttcacaccaccatgcccagcaaatttttttttaacctttttgtagagatgaggtttcaccatgttgcccaggttggtctcaaacccctggcttcaggcgatcttctcgcctcatcctcccaaagtgctgagattacagttgagagccagggtgctcaacctcaatcctcttgtttttatgcataacctacagtgcttccagcaaattccatttctcccacaaaaaaggtttggtttgtttttttctttttaatcaaaggagaattgactaaatttcctggggaaaaaattcagactaggaaaaacttgttgaataccagctttagggacagtaaccctttctagttcatgttgaggctaattcagtagattagctcctctcctttggatgaggatttccctccccagggtttggttagaattccagggatgcaggcatggggtcgtttgggggcatgtcctagtgtgctgtttttatagactatatatatgtgtccatcagtcaacttatagtatggaaagttttcttctattcaaattgggcgatttggccacttcttgccaaatttcttggttttctgaatactgaaggttggagttgagcaactgcaggtcagtgattttcagaagaggggctcttgagcctgaggaatcaggtctcacgggtagcatgatggtctagcggagaatacttgtgttttccaggggctctcttgaccctcaggcctcaggcccctcttgaccctcatttagatggccgagttagtgtaatatggagaagccctcctctcagccccagcttcacaccacatgcagctcaatgatgataatgccttgatggacaaaatgcaggaggtctaaaagtgtccaggaaaacctaaatttgcttttgtctcctatgtttcatggcttagcttgtgccacttttgttcttcctttttcttgggcccattcttgggcttcgctgctaggtggcatgcctgtattgatacaggaaggaaggaagtggttagatcagcctattcatttctttatttaacctttatatcatcacaaaaaaaatgagaaagtggaggaccaaaaggttaaaagaactcatctactctcagagggtttatatcagttgaaattgaaaggtcattttgacacactgcccctcggcaactctctctaccattcattcactaatttacctattcacgtatccaaaatgaaaaatgacacgtgcatgcacacacttccaattcatatccattgctatagttgatggtgaaagatagagctgtagtagccagtgaagtaaatatacctggaccattgccctcatgaataagtattctagtttggtagacatttttcacagaatcacacatatcagtgtaaacttgcagtggtgcatcatagtctgaaagaaaggttgatggtcctgtatctgagtgcacaatgggggctttaacctaggtgggaacgtctgagtgagtttcttgaggaaaggacacttgagggtaatgtgagttgggagccaaaggctcccgtgcgaaatccacagtctgtgctggggagaaagcatggttagttgaatgttcttgaaagacagccagtgtggctaggtgctcagagctggcacagtggcccctgaagaagctggagggccaggcagggccccgtcacacacagctttgtgagcaagtaaggattggggttattctcccaagggcagcaaggtgctgcagggaggtgatatgctctgattttgtcaagaccataggggctgcaatgcagagggcagacaggaacaagaagaataagaagaccagccaggaggttaatgcagtcatcctggcaacagatgattgaggtagggaccaggatggtgatgatgatgatgaagaaattggacaaaattgagaggcattagaagagacaattgagggacttggtgataatttggaatgggaggtaagaagtggtgccaagggtgatacttgtgattttgttataattttccgaccacctacacacctcttttttttttttttttaatagctgggaggagccagtgaaaagtatctcagatgaggtcccagaagcttcaggacatggcgttgaccttatggttgtatagcagtggcagttatgctaaaatccatgtctgtctccctggcccaccaacctcctccttttatttatttttattttttgagacagtcttgcccaggctggagtgcagtggtgcagtctcggcttactgcagtctctgcctcttgggttcaagcgattcaagcctcctccttttagataagaaaatcatttgattgtaccttagagttgttcttttaatccttttgcagtaagacagctagtctctggatgtaacctgcctccagcctcccggggttcatatcctaggcatgatagcccaaggcatcctcttcccacgtctgtggttttccctaagattcttcaaggttactgagcataaacccacctctcctgtgttcacgtgttctctagagaactttgagaaaatcgactttgctaccctagcatgctgctttctctgaaaggagacaaagcaacaaggcttcaaaagttgaaatgaaagttaagaggatggcacatttctaacctgggaggccaacctggatatttggtgcaagctctgccagcattcatgatgagacaactgtttgggctgcctcgtgtgtacactgagcagagctgaacctgaggctgagggagggaagtaaaccagccgaagcctcaactgcaggatggtggatgttggccctgggagacacaggtcctgcgacaactcatcacaagtcaaattaagggactaatgcaagcctagtagatatttaatgagagattattgctggagattatagggatacagaaattgctaataaatccctgaccttttctgagccttggctcagtgaaagagctgaatcacctgcttgaggggattaaggacagccgcctccatctggcgagccactcagactttttctgtcgttagcaaacgcagcttggtggtgatagtgttctaaaccttttagtgggaatttgcttttcagactaggagatctcaattaacttagattatatccctactgggcagagattaggactaatgatctggttatgtgtgcactgtagtccctatcacattatggtacttggtccatgataaataataaaaccgttgttaattattagtaatctaatcagcaggaaactcaagttgatgagagtggaaatcaagctctttgtgtgtgtgcatgcatgcacatgtgtgtgtgtgaaaaagaagagacaaagagagatgggggtccccaggcagtgggcaatgtgataatttacactagttccagtttagaggtttagagcagtggttgataacctgtatttcttgaattccttgttggagaaacagttgtttgaaagagattccatttcttaacacagtgttatctgtttataggctgtaaataattatcatcaatatgcaattttaatacattagaggctaacagagttatcttgagctcataatgtttgactttgcaatatgtaaatatcgtatccatttgaacttagacaactaagataaactgagaaatactggattacacatgtcatatgtaagacctttatgtgtaacatctgtgtaagacttaattccaagaaaaggagtttgctggtttcaaacaaattggagaatctctaacgctgggaaaaccaaaggaggaacatttactcagattgaatgtggaggttttgctttgccatttaccaaaagaagtaattgtagtagtgggtaaaattttgattattttctggatgtatttggaagcgtccattttattcttttccagtaaatattacttacctagaaaaggatgcacttcctacagtgccacacacacaaaaaaaggttcaatgactgatttgcctctagagggttatgtccactaattgggctgatggctttacatgcatgtatcttctgaccactggggtcatcactgtcagatgctaggttcttttcaatttttcaaaacttttatcgatgttcagagggtaaagaaatagcctttgtctagggcagaagttcgtcaatgcctagaataagaccatgttcacaagcctactcttgaaacatcctagttcagaatcaatgtctgcagctccccgtagcactgtgtaaaatggcaattttttctctcccagacttctttgattctcattgctatgaaaagatgatcttaagcacctctcaaaagaagaactaaaaggcttcacctgactattgaatcgtagttataaacattttgggaaactcctttagcacaaaacgtaattccccgtctgacaaatgctttccagtaggctctattgtgactactgtataaaggaatgaaaatcctccctgcacatgaaaagattcccaacattattagtcattagggaaatacaagtcaaaaccacaatgagatacctcttgacacccactaggatggctataataaaaaagacaataacaaatgttggcaaggattaggagaaattggaaccctcgtacattgcgggtaggaatgaaaactggtgcagctgcttagaaaacagtttggcaattcctcaaaaagttaagcacggtgtcattctgtgacccagcgatgccactcctaggtgtatactcaaaagaaatgaaaataccagttcacacagagacttgtacacagatgttcatagtaacattattcacaacagccaaaaagtggaaatggcccaaatatctatcagccgatgaatggataaataaaatgtgatatatctggaccgtggaatattatttaaccataaaaataagtgaagtactgatgctacaacatggctagggcttgaaaacattatgttaagtaaaaggagctagacataaaagaccgcatcgtgtatgattcccatttatgtgaggtgttcacaataggcaaatccatagaaaaggaattcttcccacagctgggggaagggaagacatggctaatgtgtatgggtttttggggtagggaggagggcaaaaatgttctggagttagataatagtgattaatacacagctttgtaaatactctagaaattgctgaattgtatagttaaaatgggtaaacttatggtatatgaagtatataccaagaaagctgttatttaaaaaaaaaaaattcctcccctggattccaacaggtatttggcctctgtattataggttgttattaaatttgaaaaatgcctgccgcatgagttgagttttatttggaagaattattttaattgggctttcagcctgtaatcagaatcttgagatgccataatttgcagagcaaatactttatttatactgggaaaaacaagggattgggttaataggctccttaccattttaagggaataaaaagaatggtttgtatagcaagtaatctccagggagaaaaacattgtttttctgtttcttttctggtactttacttactatcctagaggctgagtgtgtttgtaataagcatcactaagcaataagtatgtatgtaagtataggaactattaatatttcagtttgggaagagttgttttaggaattagcattcctttttagtttgattttgggaattcttggtgattaaaaaatgttttaaaatcttcagcacaattcacaattgcagaaacgtggaaccagcccaaatgcctatcagtcaacaagtggataaagaaactttggtgtatatatatgatggattactactgagctataaaaaggaatgattaatggcatttgctgctacctggatgagactggagactattattctaagtgaagtaactcaggaatggaaaaccaaacattgtatgttctcactcataagtgggagctaagctatgaggatgcgaaggcacaagaatgacacaatggactttggggacgtgggggaaaggatgggaagggggtgagggataaaagcctacaaatagggtgctgtgtatactgcttgggtgataggtgcatgaaaatctcacaagtcaccactaaggaacttatccatgtaggccaggtgcggtggctcacgcctgtaatcccagcattttgggaggccgaggcgggtagatcacctgaggtcaggagttgaagaccagcctggccaacatggtgaaactctgtctctactaaaaatacaaaacttagccagatgtggtggtgggtgcctgtaatcccagctactagagaagctgaggcaggagactcgcttgaacccaggaggcgaaggttgcagtgagccaagatcatgccactgcactccagcttgagcgacagagtaagaccttgtctcaaaaaaaaaaaaaaaaaaaaaaagaagaacttacccatgtaaccaaacaccacctgttctccaataacctatggaaataaaaaaataaaatgttcattttatctaagtttacccatatacgctaagaattaaagaaagattcagtttggattagatccaaggtgagttcaggttctgctcacttctcaaatattacaagtttattactttccctgagatgaccgcaaatcatctataaatacttgcttttctactttctgccattttcttttccactctgaccattaagtggtagaatgccttgtccactgtcctaagaaggtcaaagatgaacccattcttaaagattatcaccgggtaaccaaaacatgggggtgaattttagggaatttccagccttgttgtcaggttagaagtttccagccttgtgtggttctctgctgtggaagaagttgctgctgttgatcatttattttctgggtgagaatcctgtcaccacttgctcatttccccctagaggatggccccactgccttcatgctgcttcctttggtagtgtctttgttcttggctcttttaattttcctctgaatcatttttcttcttttattctttgttctatttttcctttcttctagtcacctgagcaggattatacttaactcagggacacgtttaaggcagtttgatggtatgggctctagagcaagtctccatgtattggctctgcatctttggtcaagatacttagttttaccaagcctcagtttcttcatctgtaatatgggctagtgataatgtcaacctggaggacttactgagatcaagtgagaaaatctattttaagcacttacccaacatttatagaccacttaatttgtgctttttgaaggagaccgcaattagttctacagcttctgttaatagcagagcaatgtaaaggtacctgtcaccttatgctgcagtttcttcacctgtaaattgaagataattttacaggttactacagcttgaggttactatgagaactaaatgagatactacatgcaaagcacttaaaaccatacctagcatatggaaagctctcaatcaatgccagctattattattattattatgttattcctgtactgttattgggaaaaactaaaaggatatgtgaccacagcatgcgattgattcatcctggtttggttaagccctatcctgaggttgatttccatggctagcaacttgactgtccttctcttgctctttcagctgcgcagttggacagcattggcttcagcataatcaggaaatgcatccatgctgtggaaaccagaggtaaagtagtttaacagatggcattgttctcatagaaggtcacgcatctggtgaggagtcagacctgctacctgctgtttcctgactttaagtgactcattagctccccaagtgccattgtcagtggatttccacaagtcttgttggtctcaagcaggaggtcctaactgattttgtgtcaccaacttctttggctgatcagaagaatgtgttaaatatctaaaatacgtatgattatagaaaccagttactgaaattcgatttttaaaatattaaaaaacacagggtatcatgatatatgtgtttctttgttaacactttataagtgatagtggtgggtctgataactgacataatttgggagcagtgatatttcaagatatccataataattgtaatgtgttatgaaaatatctgtgatttctgaccaagttgcaggtaccgctaatgctcctgtaatttgttgcttacatccataaaggaaggaaatgcttaatgtcagttataggttagtgaagataaagatgtaattgttttcctgtctaagttcacagacaccctaaattttctctggcagacatcttggggtctgtgaacccaagatgctctggggagctagtccctggggaccacccaggtagagaaaaggggtcaggcccatgttcacactgatctttcccaggtctgtgggagcaggacattaagatcaaggaggctggttcatcctgatggtctccatcccttcttcagagacagccacaaaggagattcctcagtcccagcagtttgaagctttgagtttgctggtctgttgtaccgctgagaaaagctattaaccatctttccactggatttgatttgaaccgttgtcagagatgtgaatcttatttactcacagcctctcagcctaccagccctttttaagtagtggaaagaaattctctcttttaaagcaggattcataacttgccagttgagaaatatacacttttttttccataaggactgtgaggcattaagtagagggaagagagagaatttaaaaacctacccttatgtatactgtcaaaagatattttttccaaaacagttgtaatgtatggaaacattttttaaaatgttcagttatttcccctgtacctctcttaaataaagaattaaggcatcttgtaaaggtatgtaagatatatccagagaatataaagtagaagtaggtgacatttctgggaattggtcttgaggaaataaggatatgggccagattgagccataaggatgtttacaccgtggtgatgttaaggtacaaaatcagaaacgggccaaatgtctcaaaaatgggttaaatcaacagtggtacatctgtgtagtaaaaaactgtgaatcactgacaatgcaatggaaatacattttttgacatacggccttttttttttttttttttttttttttttttgagacagagtctctttctgtccccaggctggagtgcagtaatgcagtctcggttcactgcaaactccaactccctggttcaagggattcttctgcctcagcctcctgagtagctgggattacgggcacacaccaccacgtccagctaatttttgtatttttaatagagatggggtttcaccatgttggccaggatggtctcgatctcctgatcttgtgatccacccacctcggtctcccaaagtgctgggattacagacatatggcattttaaaaattatttataatacgtgaaaaatgcaagttacaaagcagctgctcagtatgagcccgttctgggagcagtggggagaggagtggtcatattgcacaggtttcattgtgttctcagtggctgtctgctgatttttactgtttccctttgactcatctatttaccttaactgtagtttctaagtttttttgaagtgttcattactaaggtaatttttcttttttctttttctttggaggggacagagtcttgctctgttgcttaggctggagtgcagtggctcaatctctactcactgcaaccttggcctcacaggttcaagcgattctcctacctcagcctcctgagtaactggcattacaggcgcctgccaccatgcccagctaatttttgtacttttagtagagatggttttaccacattggccaggctggtcttcaactcctgacctcaagtgatctgcccaccttggcctccccaaagtgctgggattacaggcatgagccactgtgcacggtctaactttcaacaggagttttaatttttttttttaaatttaaaagaaaagaccgagaataaaatgtacagagtttaaaggtagaggcacaaaaatggagccaaaagcgagtctaaaaaaaaaaaatctctttccccagtaaagttcatatacttgcttgagctgggccacctattcgtctctcagtcttcagcagccaaaatcaagagagaaacctaatcatttaaaactgttcacagagtctgtagtaaatgcaaactggtagctcaggaggacaactttttctgatgtaaaactacaaaataaatacaataagtaggagaagaagaggtgtacaagttcctcttccccctctaaaatgaaaatggaaatgatgtattttaacttctacgaaagtcttcattgagcacaaagaagaaataaggacagtatgagttaggtgccattttagcgtaaatagttgaaaaaagtgggtatctcccgattgcagtgtgtgtatgtgcatacgtatttatggtgatcagagatgaacagacttcccatactctctgggatttgacaattgtccagtgggaggtgggattgtgtaaagtcccgggaaagcacaaggatagaagaagtagagacacttaagacttttcaagcccacaagctgacatgttactgaatcaagtttctgccactgagtaacttgggacccatcacttagtttttgaagtttttgaccagggactcctagtccgtgaatcatgcagaatgatgtacatgattttacaggtcctttttagctgtaaaattctatcattccagaccacttctttttattcattagttccatgtctacataggtcttgttgaaagtactgcagaattggtcctttcctgagtttcttttggaagattgtgttttggcccccaagtattttatactggccttgatggagtataatctcgtgttttgtttattatcatgtaccatatactgatccagggactgaggatgtaatggtgaacaggacacaattactgtttacattctattgagaatgtaacagaaaaaacaagtaaataatcaaataacaaacataatttcagatattgttaactgctataaagaaagaaaacagggtaagggaatgaccagtaatgttgattgtggattgcattagattgaagcggttgcatttaagctgagatctgaatgatgaaaagctctgggagaagagcagtccaggtagaggaaacagctggagcaaaggctatgaggtggggccatgagcttggcatgttgaggtgacaggaaggccagtgtgtggagcagaatgcatgtggtcaatgatgcaatcagaggtagtcagtgctcgatagtataggccttataggccattgtaagtagttttgattatggtctaagtgcaatgggaagctattggagggttttaagagaagaggtgatatgaactaatttgcactttagacagttcactttggctactggttgaagaatggacatcagaggaataaaataggaagctggagctctattacttgagaggggtcagatatgatgggcctggaactaataggagaaaaatcatttcaagtcacctggtctaaattgccttcttttgtaaatggtacagtggtgatctaatccatgtatttaaatgaacagaaacactgcagtggattagtttttgattttttgtttagatgtttaatttaaaagtaaacccttactagtctaattgtacagttccttgggttgaaataaaggtggtcttttttgataaagaatatttgtattataaatgaatggatcttctaatttctcagtcttggctaacattccttaaaattaaaaacattcttacacctccgtattttcattttttgtgtaaaaatagattataaagtgtctttttctgttgtatgaatttttaatgtcatttttggcattttaattttaaaaattggttaaatatgacatatttaaaagtgtacattttgcatcttttagaactcttcagatgctgcctttggcaagagaaaggaaagcttctttcgccgctgatgactgaactaacatgagggctgaagtgtgcagcacatccgtgaaatcctagacagctgtaccaaatcccactcgtttgctaagagctgagctgagtgacaggggactttaattagagcagcttttaggaggactgagaaaatgaaaaaaaaaaaaaaaaaaagtgcatttggctggattggcctgacttgtgttctgacgtgcctctaattaaatcatcactgtttctttcctcagggatcaacgagcaagggctgtatcgaattgtgggtgtcaactccagagtgcagaagttgctgagtgtcctgatgggtgagtgccgcagtggctctgctaggcaggtccctggatggggggcccactctgaaaagtcaccaggtctgtgagtagatacagcctgtggcaaaggaatcggggtgtccgtgagctgtcacctagaagtcatctgccccatcggtcagttgtcatggcttcagacactgctgggaaaggttctgagtaggactggacaaaataaaaaatgccagggcccagacaccacaccctctctgtctgtaggctcagtgctctggtccaagtggcactcagtcactcatgtgaccaccacaccctactctgtctttaatagcttatgactccctccgttctcttttgggacaggtatttagtgggacacacccaatgcccaaggaaaggcatcattctgggctccagaggacctcagagttcatgttcctgatactgagcaggtgtcatgtaactctcagataaaatatatataaccagagaaatcttctgatcctctttgcttctagatttcaaccgaatacctgtcacttgagcagcagaacctcctttgccactggctgatataaatacaaagcagtgtctccaaatgtgcagtatttgaatcaaaagcccatgagtccatgagccaaatttgcttaggctgcagatttcctgtatttttagatatgagtgcagccagcctccatgaatcacatggacctaaatggcaaacagatcaggtttcacagaggctgttattcctccccatggaagccctggcttgtagagagggactatcacttggggtacgcagctcagtgttttggacagggacagttcttgtgttagtatttgtaatttcttttgccatcccactttctgaaaatagctttcttgtgtaaagaaatctcttctctcatgttggccagaatgactgtcttcacctctttttgagagagtcattcacttcttgtagccaaaaccctattgtattgctagttagagtgagatctgttgtttaaaactatgattatttgcgaggtactctagcaacgagtatctgggttttttttggttaagatttgaaatatggttagtttttgtaaaaattaaacttttcattttgagataattgtagatttacattcggttgtaagaaataatatagagatcctgtgtaccacttactcagtctcctctaaaggtaacatcttgcaaaacacaattttaatatcacaaccaaaatattggcattaatttagtcaagatgcagaacacttccatcactaaaaggattccttgtgatgttgtacaagcacatacctcacttcccaccttgcaccctgtgcctaacccctggcgatcagcaatctgttctctatttctataattttgtcatttcaagattattatttaaatggaattatacaatacagaaccttttgggattggcattgtttttcaatcagtgtaattttctcaagatttatttttgctgttccatgtattaatagttcttttttattgctgagtaatattccattgtatggatgtactgcactttgtcgaaccattcatttattgaagggcacctgagttgtttccagtttggggcaattatgataaagcttctataaattttcatatatagtttctgtgtgagcatatatttgttcctctgggataaatgtccgagtgtgcaaattgctgggttgtatggcgatagggtcaatttttgagaatttctaatataaggaagaattaagagtctaataggtgtcaatccttagtttttcatttctgaccagagctgcaaacatttgtggggtgtctgctgcttagaacagatgtcaggtgctagagattaaattttagaaagagctgttccttttctgtaaggagtcctgatagggtgaaatatgtgtgtatatgaaagctgtaatgtaaagtatgatattcatgcttaatctgtgctgggtctagaagattgagtagtgtagtgaaggagagagtagaagaataattccaattcatgaagtattctgaacaaagggtctatggtggctacagcaaagggtattgattctatgattattattttaatatttctgaaagacttaacttgaggctgggacaggagagttttaaagctgaatagctaaggtggtcttttttgttgaggaacttgaatactgagccaaggtgtttggggttttttctataggaagtaagaaactattaaaagttctcaatagtgggattatatccattataatgcttttgcacacaaaagtgtcaagaagacaattcagaatagtttacaaggaaaaaaaaagcatctatttgctcatataactggtaaatccaagacagaagcatggcagagtcagggatgccaatgatgtctttacttttgctagatcctttgccccttccttcttctggcttctcatgttctctgacctcttctgggcttggtgtggctttgttctctgtgggagtgtcccagacaggttcagcctctgcagtccttggagcctgtggtcactgagaagaaagtgcctttcttgaccatgttggcagaaggctccagcgaggactttgcttggtcagtatggggccattcacatgattcgtttctcaatctcagaccagtcacatggcccatggcagatggcctggatcctgtgcgtatgttgggggatgtgggggatggggtggacagttggggtggggacggggttagtccctgaaacccagtggactgagcaggattattgataggaagatggagaagtgctttcctgaaataatggctgctgttagcttttttaaaaaagtatatctaatacagatgtaacaatatcagattctagcattaggagcatattgttggctccaatttggagcatgtgtttgattatggaaagacatggaggaggaagttggttgtaatagatcaggcaaggcaaaccctatcaaagactgaactaaataggtgctctgaagtcaggaaaaaaggacacactcatagtgagtatacagagagaatcaacaggacttttaaccaacttgatatgggggaacagaaggggcagagagatttcaaagatgacagattattatgtaagatgacactaatgaaaagaaatatgacattttagactggtttgctaatctaaaaaagaagcactttagctcagttgtgttaagcaaaagagtggttatgaaaggatcttgtttttatcacttttcttagtggccttcacacaagatatttgtcttgttctcttccttgattttcctggggatagagaaaataatcatgaacatttgagaaatgtcatgaaaaagtaataactagcagctgaaagtcacgagggcagctgcctctgccaggaggacattacagacagactggaatctaatctgagatccaaccagagctgcaagatgaccacagtgtaacatctaattgaaagttgagaatgatatccatgattctccctacgagttaaataagtttgaatctctcaattacggaatcaccagggctctagacccctttgaagggggagcttcatcttctcttttgtgaacatgcccacaacttcatcaattcttggtactggtagtgtctgggctagccaagagtataaaataaacatggcacctgtgctccaaaaccttcccctgagatggctgggccgagtgaacctttcattaactatttctttattatacattcattggatgcttattatgtgccaggtactgtgtaagatttggtttatctgtccaaggctctcaaaagtggagtagtatgttttggttatggaaaatatggctggtcaggtgcggtggctcatgcctataatcccagccctttgggaggccgaggcaggtggatcacctgaggtcaggaggtcgagagcagccaggccaacatggtgaaaccccatctctactgaaaatacaaaaattaggctgggtgtggtggctcacacctgtaatcccagcactttgggaggtcaaggtgagcgatcacctgaagtcaggagttcgagaccagcctcgccaaatagtgaaaccctttctctactaaaaatacaaaaaaattagtcaggtgtggtggtgcacacctgtaatcccagctacttgggaggctgaggcaggagaactgcttgaacccgggaggcggaggttgcagtgagccaggactgcgtcattgcactccagcctgggcaacaagaacgaaactccatccccaaaaataaaaaatacaaaaattagccgggtgtggtggtgtgcacctatagccctgctactcaggaggctgaggcaggagaatcccttgaacccaggaagcggaggttgcagtgagccaagatcacaccactgaactccagcctgaatgacagagcaagactcagtctcaaaaaaaaaggctgagaattaagcaaaaccagagactttttttgaattacttcgagtttatttttttgtactcttaatacattggaggactttgggttggaagaggaatatgagagccagtgctttgagaatgtcttctttgtactgatcaggattccttaagaaagcttgctaaaattcctcatagcaagtgcagtgtggctttgtactagtgtcctaccaagagctacccttgatcccttcctcctagcaacagaagtcattagtctttagagagtgaaaaggactctcaaagacttgcagattcctagaaatagaatgccttctgtgtgtctgggggttttcccccctgaatattaagtaaagataaatctttccaaattttagcccaacttttttatctatactatttaatatgtaaatcagctatatacttgttcagtgtatgtctatctctcttcctgtctctccgtacatattttaaataaattttttcctgatgaaaagttatgagtggtcattgtgaaaatttggaggaatacaaaaagtagaagaaaataacagttctatatactagagttaacctttattaactgttttgtcatatgacatcaaaatgttatattattacctgttaaatttagtatagtatagtatactaaaacagtatgtttacaaaattgaactcactgtgcagatattacaggttttattcatgtaacactatagagtgtctattgtcacatgtcattcaagttcttctagagtgtgattttctcaggcacatattgcacagatgctctataactttttaatcagtcccctgttcttggatacatgggctaattgcaattcttcatcattctagaaagcactcaggtaaatatccccatagaggcaggacagagggtaaacatccccattgaggcagcagagactaagagcatgcattttgagattagacaagttacagttccaccgcttatttctttcacttagacaaatgattcacactggtctagtcatctatttctgcatctgtaataatggctcctgcctccatagtaatgtgaggatggaatgaaaagatgcttgtgggttgctgagtccagagccttcacatgttaaatataaaatgttagctgttataatttttatatgcatctctaattatttcctcaggacttattttaagatgttgaattgctgggtcaaggtatgtacgtgttttcaaggctcttaaatgatattcccaagtgtgtagttagcaaagtctgagggagactatgctacaccccacatctttgccatgctgtgtattactgttttgcatataaattattaacatttttaaatgtatctttttaaatttaattttgcatttctgtaattttgggtgaggttagactgtttacatatttattgctgatttatactacttttgttgaattgcctatttgtattcttagcctatttttctattggtatgttcttctttttcttaaaaaaattttttttgttttatttttattattattattattccgctctgttgcccaggctggagtgcagtggctaagtgttggctcactgcagtggctaagtgttgcagtgaggtaggaacctcctacctcccaggttccagtgattctcatgcttcagcctcctgagtagctgggattataggtgcatgcccccacaccaggctaacttttgtatctttttagtagagtcaaggtttcaccatgttggccaggctagtcttggactcctgacctcaagtgatccacccaccttggcctcccaaagtgctgggattataaggcgtgagccaccgcacctggcagtgtgttcctcttttgattacaagacctttttagatctatagactatattttcaatatgttttgtaagattattatttgtcttaaactttatggtgcatttgtttttgttgtcttatgactattttattgagatggggtctcactctttcacccacgctggaatgcagtggcattatattggctcactgcaacctccacctcctaggttcaagtgatttttgtgcctcagctacctgagtagttgggactacaggtgtgcaccaccatgcccagctaatttttgtatttttagtagagacggggtttcatcatgttgcccaggctggtctcaaactcttaagctcaagagatctgcccaccttggcctcccaaagtgctggaattacaggtgtgagccaccatgactggcctattttaaatttttatgatgtccagtctgttatcttttttctaaacgaattatgccatagaagaccttccccaggccaggtgcagtggctcacacctgtaatcccagcactttgggaggccgaggagggcggatcacaaggtcaggagttcgagaccagcttggccaacatggtgaaaccccatctctactaaaaatacaaaaattagccaggcgtggtggtgcacatctgtagtcccagctactcaggaggctgaggcaggagaatcgcttgaacgtgggaggtggaggttgcagtgagctgagtcgtgccattgcactccagcctgggtaacagaatgagactccatctcaaaaaagaaaaaaaaaaaaaaaaaccttacccaatctagaatgacaaaaaccttaattttccttaaaatctgtcatgcaaagtggaaactcttctttttcctctaatacttatccacttgaccagtatccatataatgagtcatcttacccctttccactacttttatatatcaccatgtaatcattcttttatacatattgggggccactgaaggagtttttatacatatttttctaaagacaaacaaatctctttactgtatgtttttctgtaattctcaatcttttaaacacaccaacatttttcacctttttaatgcttaatttttctcctgattctttatattctagcaaaaattctcaaacttgtcctccatctcagtattactcatttaaaattgttgggttgattgtgattattattttgctgtttataatgcagattttaactttttgtaatggattttccaatgtctttattatctttacttatttaaatccttttatttctacttttcaggtataatctttattatttcagtctgctacttgttttattttgttgtcttggttcctggcatccatatttttaggattttacttatatgacagagctggtgttttctgaattatttttcagagtgctttggtctctgtattttttgccaacaaatattttataggattttttatcttctgtttaatcaaacctttgcttttaagctcactgtggatagattctccttgttctgctattttcctgattcctgttagaatcattatcttacctgatgattggaggggtattgtacataatttgagccaactttctggtattcttaaagctttcatttagtgaacctataagcctgcattgatttttcctggttttggtatttggtcatggtcctgggagaagccggatttactcctggataatctgaagcatgctgtggttcttcccttatgactctcatgtttcttctacggctctccttctgattcacttgccttgatataagaggacccccctccacttctgctctgtagtctgatttcattgcctggattataatcttatgacagctctgggtgccccagaaagtagcccccaaaagtgtgtttgctggagtggggttggggggttgcagcatggcctttcccccacacccctgggtggcttgggctatgttgttggtgggcagagggccaccacctatcacattgtttccccagctggattttcctcaggccttcatctaagctttgcctagtggatatcctggtggcaggagaatgttgactgagagcctaattttctgtgctgttaaaaatttgtgtcccttttttgtgtgtttttaccatgatgataaaggactgcaaattcagcatcactgtttttctcgtcctgtaaccttttttgttcttcttcttctttttttttttttaaaccacatttaaagcaaacttagtaaaacagagaacacaatgaaggtattatacagcagtgctgtaaagcacggaattatagtagcatgcttcacccacttaccgccgatccagccatgaactatccttccttactctgggaccttgaatgtctgcatttctttttttatgccccttatttcccataccttttcacagagtggcataaataaaagcaatcaatgacttctttctgaagaaatcaaaatgctttatgatgatttctaagacctaaaggcttacataggattaagtggaaacagcccagactttgaagactggagcctactggagtaggggaaccatgagaagagcaaatgtccaattttgtctaccagtgaagggtagcagacaaaagatgacaggaccagaagatgatagactacttggatagaggattgatcattctgggagctagcaatacggctactaatcacaatcctgagtccccaaagaagaaacacagagatggaagctcacctcctctgctccagccaccatcacctttgcctgttgggatgcttcaggcaggctctcctaagactgggtcttgagccagtaagagcttttggatctcaaaacagaagggactgttagagataggaaatgcacataaaaagctggcattagcagttgcctctaccttttcatgtatatctgtttttttttctttgaattcttaacatgtgcgtgtattactttctcacttaaagagagaaaaagattaatttgcatacactataatgtgttattaggaaattcaagagtacataggtaactttcctaataatttcctccaaaatatccttcattttgtctgcaacacagtaatagactagatggcccttgggactgatccaagtgtgacatttctaagacgttctccgcttataaccactgcttccagtctgtgtcttctgattttctgaattcatgtgatagtaggttcaggaggaaataacattcattctgctttccccacatgatgccttttgtacattggattgctcctctagtttagatctgttttactaagcagcagtggtcaagggacatggtggagagaagtgtactgagttctaaagaagagtgtaaatgacgtctctgtggcatattcagatgccatcaggaagcttttgtaagtgaggggagcatcaggagggaggtgtggaaatcagcagcactttctgaaaatggtgtagcttgggaggctgtattcaacttagcttggattttaaatgaattaaaatggatgtgctcaagttatgagccttgcctcatcagtgctataaaaagccctttagccgggctgtaatttgactctcctctctaatgttacgcaatattcctatggttacagagcccgaataagtggaagctaatcattagtttgctaaatgtggttcatgcaacagttcacaactcccagacttgccaactgctgcttgttcagtttcatgttcactcttcttgggtagaagttggtttcttctttagaaaaatgtacagtaacatttgtctcacatccaggaaccatgcaggatggcagctctccacgtgtcttaggatggggagggaaagaggtcatgcaaagcagaggtttttgatacatactcttctgcaggaaaaagccattcagggagtgcaagatggcaaagacacaaattaaagtggcagacattttggatactgggaaaatcacattttgtgaacttttcagaaatttgctgtgatagaactctatggaatttactgttctgtagccccagaaataaaattatgctcttgggccaggcgcggtggctcatgcctgtaatcccagcactttaggaggccgaggcgggcggatctcgaggtcaggagttcaagaccagcctggccaatatggtgaaaccccatttctactaaaaatacaaaaattagctgggcatggtggcacatgcctgtaatcccagctacttgggaggctgaggcaggagaatcgcttgaacccaggaggtggaggttgcagtgagccaagactgcgccactgcactccagcctggtgacagagtgagactctgtctgaaaaaaaaaaagaaaaaaaaattatgctctttaggtttttccttgtttgtttcatgtgacaggaaagacttcattttattgctcagtgtcacctgcaaacatcatacaggtactgtgcctttgagagccacatgtttctgagctggggaccctttcctctctcataacccagtatgtgtcaggggaacacacggagagcagtagataccagctggatttgtgcccctacctggtgatgataggctaaatcctgaagccattcatgagtatttggcctctttctatttggatgaaagtggtttctttcccaggaaatagaaaatgtcttctgcccacctctgacttattttttttccagctgaaaggctgttggtcctgcaggaggaacagctttcttcattgatgtcccagaattattcttggagactcttcagaaagatgcagtctggtggctgcctccctttacctggtgcatcatttagatctctttgcattgtaaaaagacggaaatcctgacctcacctggcttaaggggaaaaaggaatttactggctcatatgataagaaggagaggcaaatacaagggttcaggatccaccatttctgcttatcttgtctctgggttgtcggactttcaggctctgtgtggtggcacctggcagttacataacctcctagtgcaagcccagcaaacagcaaatatctgttcgtgagtcctggagagttactctgattgggcaggcttaggtcttgggccatccctcatccaggcactgagtccagagagttgatatacttttggccagtctgtcctgaatctcattctccacccctggaaaaagtaagaaaagggttgctctccaactcaaaatgaggtgctatgcagaaaaaaaaaggactgggagctggtggcaaagaactagtctttagccagtatgagggagctggattctccctcctgtgcactgaaaaagactctgtgaccctcccaccagtatgtgtatgacctggcctgcctcaccagggacaggatggggatctgtgaagcaattacactccccaacctctgcctcttcttctcacctccttgtgtgctactcaggaagattataagaattatctctcctgttcttttatcatacatgcttgtttaaaatatactgatttgtttaaaagtccatgcaagaagagacaaaagaaattgtcagagctgatatggtggttctcattgcacatttgagcttaaagcaatttttttaaaaatacaaaagtaatggaataaaatcataccacagtccaccactttaacccaaccactaatttagagtatttcctttcagccttgttcatataaaaagttcatagaaaaagtttctcatagacatatcttgtttttttttatttgacattatataatgcaggcattttccatgttgctttacagtcatcgttgtcatataaatcggcgaggtaatattccatcaggtagacatacggtaattcacttaatcattcttctatcgttggacatttaggttgtctcctttttttgttgttttttctgcttttgcaaagaagagtgtgtgctgaacgtttctggggtctgtaacttttctcgtgccttatcttattttctgaggatagactgtgagaaatgagattactggttcaaagggtataaacgtttttaagactttgatacatattaccaaattgcttctcaaaactcttgcatttgtctctcctgctgccagcaggataggagaggatcagtttcactgcattcttgccagcaagagatattggaatttttagacattttcctaatttaataggtaaaaaaaatacttgtcatttttgttttactttgcatttctctagttactagcaagattggatgcctttatgtgtgcttatttattagttccattttatgctgtgctttatgtattgtcttttcttcattttagaccccaagactgcttctgagacagaaacagatatctgtgctgaatgggagataaagaccatcactagtgctctgaagacctacctaaggtagggactttccatttgcaaggcagagtgccagctagttatcatgcaatcaggaagaaagcagttttattttcagactccggagagctgtcgggtgggtgtttgagatgtggaaacagcttctgtgtgggtgcgtttagctcagctggtcaaaccaatcgtaaatcatccatagttgatgggttgcctttgtgcagtgacaccctgagtgatttaggaaactttgttctatatgagaagtattgtgataattagccatgaacagaacctaaaatggggtcttccccgaagtccctgaataatctgttaagaacacaaggaatcatgaatcatcttctgttaagaatgcatgattacatacctcatgtattttgatagtttcatactttacacagagtacattgctgacaatggttcttaaaaatgagaacttaatggaactcctttttgactccttcccttacactggacaatattatttctctgcagagactattttccttgtatcatttatatatgatactactgtaccctctctatgcctcctttcattattaaaggttgggttattgaccagctgcctgcatcttagtttcatgaatagaccaaaatatttatgctggacttgaaggacaggaataccatagttcttaccaaaaaaggtgggacctagtcttaaaaggagaggggaatggtcatcagaaatagcataagtctctgtgcagattttttgaagatggaattggctggaaagcaaaggaaggaggccacagaaaaggaattgctgatgtagattttattggctattgggtaattagagtcaagagtaagatataatgtaagtgttaactaaaactaggagtcgaattaagggacccaatgagaataaaatctgagccaagaataatgtatagtcctattgagaagtttcttatttgaactatcaggaaaaaaccctcaagtttatggttaaacatactcataccccagcaggtaaaatttgtttatatcatacctaatgttaggggttctagcattctggagcaatactccatagtgaattcaccaccacaacacctacaaaaatcttttatagtgtttctagatgaattgattctaacaacaagccgctgggaagatcaagacttgcaaatatgtagttagttgcctgtttctcagacacatcttaaaatgctgttgttgatagatgagtcactgactgaaaaggaaatctcttagtttgtgttagactcttgcattagcactattttagtgttgacaatgaaacatagttgtgtctattcatttaagaaagagagagaataaacattttgggtgaaatctcagaacgcttgcaatagggaaactacattgttattgtttccctgtgatctttgtcttcgagaaatgtattacagtttgtcagtctctaggctgctatttagagagaatatgattattcttattattaagctgactagcctatctccttttcctccagaatgcttccaggaccactcatgatgtaccagtttcaaagaagtttcatcaaagcagcaagtaagtcttttttgtctcagttttaaggggaagagaatagatttttctatttcaaagaagagtcagtatcccaaaataaatattacctaacccttcgtattctgcacataaactggccacataacatactcatgagattctaacacggaataaaaaggaaacaaatagggattgctaagggcctttctaccacattgaatttacagcagaggacagaaacttcagaagtcttttttttttttttttttttttttgaggggaggaggatgttggagggatagagaaaaacaagtttgcctttctagttttgattattggagttctaacttcttaggttttttccagcctttgagtagcattttgcagaatgaatcagacattgcacattacctaaattgagcattggaaatgtttccctgaatatgacaccatttatataacttcacagtcctcttttccattatgtcttccatttacagcttctgatcattcttcaactacatcatccaggtcctggtgtcatattactggtattaaaatacatagggattaggtgcaagctactctaagtatactggaatctctggctacatgggtcaggcctcttgtaaaggggcagaaagattctctatcagatttaaatccagcatgaatcttcacagtattattatgtcgataacttgtgtctctcccgggttcctttcagcctttagaatttatttactctggtagctactactggcctaatttagtagtacctaatgttctggtgtccttatctactcatagttgtccccttaaaacaggaaggagaaagccaggagcgaagatggtgtttatgtcatttctttctagagaaattacaaacccatagcaaccattctctacttaaacctcacatcagttctataaataggtgtgatgagtaccatcagtctatttgccagagtaacaaagccacttaccttggttcaaccaagagaatgtgacaagccatgatttaggttacaagttggcagaaagacttgaatattttatctgccatttctttctttctagcaggctggttgtcatatgtgacttgaggatactggacatttcctttgatatctttgatgctgtctcaaggtgttattttgatatttgaaacccttgcaatgttgttcatgtaagatttgtttatcactttacaagtgcataaagttccttacttccttgaaatgaagtcttccctctagggagccagctactcctgagtttgttctcaggagcagctctgggtgtgcagttgactggctccatttcatcacatcatcatcttggctttgattttttgatgacaatttttttggcaaccctgttccagaaagcaccattaaaaggacttccagatctagtcatgctggccacgcagtatgcacacaagacaggattgtaaatctttgagaaatccttgggctgttagtgctcatcctttggtttcccttaatttttcaaccttaaagttgtttagctgtgacactgataagatattacctccctccttcctttgcagaactggagaaccaggagtctcgggtctctgaaatccacagccttgttcatcggctcccagagaaaaatcggcagatgttacagctgctcatgaaccacttggcaaagtaggtttaagaccaattactagcctttttcttacccctgaaagttcttatcttagcagtgaagctggtctcagttctgcttttgtttctctctcccactattgcatcaggtatgctggaggcttaggaaagaaatgtgtgaaatgttcattgcagtggagaacagcagcaaatgccagatggccttcccagaggatgctggggaagtgctcatgcaaccaggccaccaagcagagttttcagggggattttacctatggtgatcaagggcaaattggagtgtgttgtccatgataccaggtcaccacacagaattttgtgggattatatgttcttatgctcatcaagaacaaacaaaaatatgttgtgggtttacagaatttgggtttttagtaaagaggactggattctagagctgactctgttattaacctgctgcttaaccagccctgaacaaactgctgaactttctattccttagtttccccatctgtctaatatggataatagactcccctttttctacaaggatcattgatttttgaagttacatgcattaaagcctttgaagaagtataaagaataaaggaattatttttggcaaatactcacttgtcctctgagataatcaaagcattcagtagggacctgattttcttggaatggttttgaatatttgtgtatttactgttccttgaccctttcacaaatggcattgctgacttcccgtgctgcattcatcactacttgtgtgtgtgttctaaccttccgttgactttgatggtatgttcttgattgcagactggagcacaagaaaagaatgagagcataacagttaacctaaattattaaaccctacattctattgaactgatgtgttataaatttggcccttatagtccatactttgctatgccattagggtatttcttggggataagttgatattcttctgagggagattgtaatggttagttttcatctttctgtcaagcacttgatattgcctttgggaaaaagagtgatatatatcatgaagatttccaccatttcctcatttccatcaagaagccaagagtgtcttgtgtgttattgggaaggaattcggcaaagccacagttgctccattattgaccaactttttttcttggctttccatatcagagctgcttgttcaggagtacttaggaagaatagcagataacatgcaagtttacaggagaatgccctaaaggtgtcaaagaatcccgatgaagcatgtttaaaataatgggaactgggctttaaaaagtaactccagatgctctgagatgacagttgagtaccagttccacacaacctagagtcaggcgtttgttaagcagagaagctggtttagatcttagttgcaaaactttgcacacttgaaggacaaacaccaagacatagaaggttccaggtgcaccctccagcctagcatgtgtggggatgctcatgactgcttcatggccatcgggtctgaaagaggccttcaggcctgcagagagcagctggagaagggttaggaaccatctgaaagccatgggccttttcaagctgtgcagttggaaggagagcttaactgaactgagagagaccaaaagtgaagggtgacccagcagagccagtgttgcgtttttcctacttttaaatttcctttaggattgttaggattctttaaagaagaagaaaaaaggatttaaaaaacaaaaccaaacccttaaggtagatcttgaacagttgaacttgttcatctcctggttggatgactcactttctcctccttttcccaccctttccccctccagtcccattacattcagtccatccttgttactaacctaagagttgtaaactggaatttgcaaatcacagttgtgaccttgacacatttttgtttttttggccttctaaccaatttaaggcaattttatttttggagttgtttacttcatagcatttcttgatcattgtcttatctgtgaaacttgagaatgattttctgtggttttatggcatgttttgatcatttaattatcaagaaatctacctgtagacaagctctcatgctgtaatgtgagttggttagagctagtattagactatagcggactcaaattcttagcgtgctgtgttcttgtctctcgagcctctatatttaaaatgtccctgtggagaaggatatgaatgagcagtgttgaatccagtaaagagtatttatttaggtctgaaaaaattctttggcatccagaggagttctaagattccacttaaactttatattctcatttacagcactgtccttattttaaaatcaagcagtaagggaaagttaacttgggacaagaggtttgtctgattccagttttctcaggtttagacttaccctaggctatgcctgagctattgttcctctgggctacttacttaatggtcagcttccttcctaagttttggtttcagggctgattctgctggaaaactggtgtttacttctcttattacttactgtttgccttgtgcatctcagaattctggttcaaaggcaagcattttgtattgtatattttttaaagtactcttttgaaacattttccaaaactgatttcccttagccacagagggagatttaaggcattttatatttaatcccagctaaaaattcattcagaggggaaaaaaagtattgggtggggggaaggataaaaactccaaacctctaaagcaaatgattaccagggtacatccaaatcacagagatgttggatttgtttcagacctcagagggaacataaaaattataggcaaccatgcacatatttttgtagtttcagcttaaatctactatgataattagatgttttctgtttggatcttggaatctagtatacagtctggagtcatgtgcctcaaagcatggttagaataacccggggcgcttgtttacattgacatttctgggctctgtgggtctactcagtcaggctcgctgcctgggaatctgcatttctgatttattttgcaggtaattattatgtgaacagtgatctaagaaccactggcccagagaatgggccatatgcaaggattttctaggacagagaaaaatgatattgagaggaatatggattgggatgtaggcgaatattagaattagaaagaagaagctcaaagcagtgagttcaaaagggagattttattgtcgtgattaaattagcttttaaaaatccagttttgactttccaagtctttgcaatttgactttgtgttgagttttcaacaaatgtttttgttttaaaatcatgcaaaaggcatttttacttttgcgtgatttagttttgcatgatttacttttgcaagaaaaaaatcattcccagatagctgtggatccttgtgccaatttttctacctctttgagcctcagttttctttctcttccaattgtataattctgttatttttatcaggtggagcaggacacgagaaaagtatcccactcttataatcatagaggaaataagagtagatgagtaataaagactaatttcatggtaatttcctaatgtttacatattatgactccaagtatgttgtatatccccacacataccattcgtagtggctcattgtagatttattaccgtgtatgcagtgaggaaggatttcaaagaactcttcatacatcaggagtagatattaaaaataccttttcacagctggttttcccaaaatacttattgagaaacaaacctgagtctttttccttttttggagcaactgttcctttgttgcaggggcattggagaggcagagcactgtcttgcttccccagagagatatggtatcatttaggatgctttgagctgcaagaaacagaaaatccaattgaaaatggcttaaacaataaggagatctgttgtgtcatgacacagaatctgtcctgagagttggttagtttctcagctcatgaaggactcaggttattttcatgttcctgctcagccagcgtcttgtgttggctagctcctcgcagagtcccagcatactttattgtgtccttgcatgttagtgcttgtccagaagcagaaaaggcattatttcttctctgagtccctttttaagggctaggatgatacttttcccagacatcttccagcacactttatgtcacatctcattggtccagagcagtcattgaggaccaccatgattattttccacccaacaagatttatctgagccacttgtgggaggattggatatcagaataaaggcagagctttgacagaataaagacagcccacggtgtctacagcaagtagtcttggtaaatcacattcaacagagagtattaagtctattgcatggtgtgctaacacaatcaagatatataggacaaaaaagaccaatttttgtaggagagatgagtacatctgcagtgtgggcacataggcactaaattataagattttagctggtgggaggtaagagagggtaatgaagagggcaaaattgactttactccattgcctcttgctgattccctatgtgttcttttcattacccaattgtctaatgtttattttgatcatctgttatatgttgtgactttccaaaatggacaaaattctgtagatcactgggattataaaggaatattgtggggaaaatgcttggcatacaagtgagaccttatcaaaatatgtagactctgttggcagaattatcaagaattaagcatgttgtagcttgggtttttttttttttttttttggttcctgtgacttgagtctgagtacttccaggcatctctgcaaatcaaaaagggatgtattcatatttctttaatgatctagaaacagtgaattgggttcatatacaaatgcttgtggttataaaaaaaagtcttgccaggcattggcaccaaggaggatgagccctagtggttcagtagcattccttgaagttcttaagaagggttcaaaataaaagaaagtgaacattaatacttaacataagcacattttagatactctaatattccctctttttccatcccaaatctagaagataagatttaacttaccaatgagctgttaaacatgagaagtgctagttattcatttgccatcaagactagtccaaataaaatagccgtagaattttacaaaacacatttaaagaaaacagtatgttgtgatgatggcttagatggaaagctcctgtgagtttctctggctgccttccctcagccatacaccctggctccggaacctttgttctctctagtaaccactgaacaccgcagtgctgccagtgcaggattgcttggccgctgggccactggtggtatggcctgatacccccacgcagccacattgaccccattctccagtcctatcgggcttttccctcactgactcccaccgggaactcagagttctagtgattttaacccttttctatctcttgaatctgtctacttttctctgtctccatcagtactcctgtagtccaagctgccattgtgtctttcccacgctgcttgcgaaggcctcctccctattgctctggctggtggagctctggctcctctccagtccacagagtgcatgttgtgcttccagggaactttgaaaactgcaaatctcagcatgtgattcccctgcttaaaaaaacttcaaaggcagcttccccattgctcttaagataaaaccctggaaatggcctccaaagccctgtctggaccagacgtttttggaatttgcagtttcatcttgtgtctgtttctcatgatcaccatcctgttcctactgcatggcacacaatagacgctcatgaatatttgttgggcaaatgcatgaagagtctcttgaccgcttctcaaatacccacctccctgctccatccttttaccttttgcaattcattttctcctgtctggaatggcccctccccagcctctgcctgccaaaggctacctcattcttctagcttcagctcaaatgtcaatgtcactgccaacaagaatccttcctgccacaagtgccctcttgctttcctgagctcccacagcctttgcttgttcgtctcttttagcatgtatcacattccacctggtgggacagtttgcccaggtatgtatctctccctcctgtgacatcttaagctctcaggggatgggcagtctgtctcccttgtctttgtttcttacctagaagttacaaacgaagcccatggccagagcagcccacacatgtgtttggtggtggtggtatcctacacattactgttttgaaactttgaacaggtttccaacatctttaaagggggcgattttacttgaaaaattcgtatctcaccactgacaattggctggagctgagtagaagccacaccctatcccccagggtgtgccttctccagtttgccttagttcctaacagtccctgttgtctcttgctcccggcctacttcattcaggtctcctacctgcctggccgtgttgtaggcatttgggttttcaatccttgcctacctattggcttatgccaaaagaggagctcgatgtttggtgaatcacataaatgagcaagcagaaatgggctaagggagttacttccttgactggctctttttttttttttttctcctggaagatttattatttctgatagatgggaggtccatgaaagaagtgagtgataccgcttcctggcctatttatgggtatggggcaggaagaagagtgcattttttttaagactaagaatgggattctcaaaggaccttctccagctatttttggcagagtcaaaggaaaatctatttaaagggacattgcacagagcacaacgacatattttaaagcaaacagacaacttagcactttaaattaatggaaatggaaaggaagaaatcagagctcaacattatttagcctcaccgccagacctttgcttactttcaacccaagaatttgtctgttctgtggctttgtagcctttagagataggagagagaaagatatcagttcagtttaaattttttgccttaaaaaacccaacaacatttctgaattcaaggaactaaatctttcacatcacatgtaacgcccattctgaaaggggaaatgcttgacttcaagctgttaatgttcagcagtcttagagctcctttgatttgggtctcttgtttgttttgagttgttccacttatgtttggatttattttctcaataaatttcctgttttctgattcatctcttccttttctgagtccatggaatcccctcccaaattaagggaggagtgggaggaagacactctgtttttcttacttggtgccgcctttaattttgggagtattataaaagtgagagagtatcagcaaacatgaacatgactcagtttcttccttgctaatcctagcagagcttagatttcttatacattggccttgggagcgtgttcttcatgaaatgcctctctttttggctgagtggtggtggataaattgattcgctcacactgttttgggcactggagtcctctcttgctgcatcctctttgaattgcatcatgagtgttatctgcgatacttatgttcttacattgactggttactcaccagctcttcagaacaattgtggctgaaacgtggcagctggcagacttctacgtatatgaagttaatccatggggcataagagcacagtggtgaagagagaacattctgtagccaaactgcctgattttgatctcatctcttatgtaaccttgcatgtgaattatttctctctgcctgagtttcctaatctgaaaaagatgataataattgtatcagaaagttttaacttcgcacatcaggttttcttggcttctcctgtttgtattgcagccaccactgagatgaccacttctgtgtgggctccgctgcccttcctgcaagtgcagcctggtagcctggagcctcatgcctgcgtttcttacctcccaccctagggaggcatgacacaaaatggcattcacacacggatacgctgggacaaggggaagttaaaaaactctgaggggaaaacctttggccagtgggagaagggagctgagtatctcagaagcaattgttcaacagcctctttgaagatggtctcaagagattgagcaattgtgttagtgcttgaaccaggtggggtctagcttctcttctccgcctcattcccccaagaatcccctggtaaagtagtgtcaggtaagcctttatgtacagtcatgcgccacataacaacgtgtctatcaacgatgaaccacatatatgacagtggtcccttaagattatatcatgtttttactctatagtttctatgtttagctatgtttagatgcacaagtacttcccattgtgtcacagttgcctacagtgttcagtacaaacatgctgtgtgggtttgtagccgaggagcaataggctataccacagagcctaggtgtgcagcaggctcgaccatctatctgggtttgtgcaaatgcactctatgatgttcacacagcaatgaaattgcctaatgacatatttctcagcatatctccattgttaagcgatgcgtgactatacttcaagtctcttctttctggaaaacctaaagtaatacagtaatagtgcccacccttttagagttgtgcagattaaattaatctacacaaagttcttagaagagtgcctggcacataatacaccttccataaatgttaatttctacaatctgttggagaaatccgggaacgggagaaagaagatgatagagctggttttagggtatgggaaattggggcagttgttgaaaccaaaataagtcattcttgctgactagatggggctttcttcatagttttgttattggcaagcaaaaccctgagggctggatgctgaaaacatagcacacacagctcttgtccacttgggagatttctgtgtgtgcatgtgtttatttttgccttgcttgtgtttgcttagcagtttgtgtgcatttggcccaaagggctgagcatctctcccttcctagcagaagatgagccagcacaggggcagctgggagaaagagctgttcatatctggtttcaggtcctaccttattgcaagtctcacacttccctgtgaatatcagggctcttcgtgattcaaatgctctgtggggtggtgcacctgtttgaaggaacaagccacgtagggctgatttccatggaggttacctccccctccccctcctctgcccctccccctcccgcttctgcttcttggtgtcgcaaggctgatttcatctccgatgcagctgtctttgctagagtttaataactcttaatttcctggagggggatggcgcgttatatcatgaagactcatctttgtctgcgtggtctggaaatttccactcatctttgtgatctttgagatgtttccctttgtgggggagtctgactttccttctgttttactcagtttgactgccctctcagatgtcattcccagattaaacatgaccatccactgtgaaaacggccctcttgaccttccagtttccccctgggagcagtcttcacatggatttcctttcccgagttactgaaatctgtattgaagtattaatctatactctaaagaaggtcatgcctatattcagcttcattctgttttggtagatattttttcacttttgcagtttcagtccaagaaagggcttgaacaaaagttcagggggtttgaattttggtatcagtcttttctgcttccacacatacacaggaaagtttttcttccagcagtttagcatcctgatttatttcgtgtttccaatttggtattataagtcactattcttgattctcttcagtaggcggtaaaggaacacaaaatgttgggtcttgttggtgtattgcaagcaggtcttgctatgtacttggagatgcctagaattgggtagaatagggtcactattttattaaagtcagatattccatgagaaaatggggcaccctaggcctcaaaaatcagtttgtatattagttctttggctgtaagcaacagatgtcaactgtggttaatttaaaacataaaaacagggtccaagagcagtggctcatgcctgtaattccagcacttggggaggccaaagcaggcagatcacttgaggccgggagttcgagaccagcctggccaacatggtgaaaccccatctctactaaaaatacaaaaattacctgggtgtggtggcatttgcctgtagtcccagctacttgggaggctgaggtacgagaatcgcttgagcccagggaggcagaggttgcagtgagccaagaccatgccactacacttcagcctgggtgagagagcaacaccttgtctcaagaaataaaataaaaaataaaaggaataaaatttattgaaaggctcctgggtcaatcacgtaatggaaagtagaattgaaccatcagacatcgcaaagcaacctcaagggcgcttgtggtacctggcatcctactacatttctctaggccatttcttctcttctagatgatcatctcagatgttgcttttcattccacagagaaaatagatacaatcagaagagaacttctgcaagctaccaccacaatatccacacctgtgcctatgtttctgccatctctcctgtgcgacaggggaacccagtgctcctacctaaaggcattccctttcctgggacactagagccgattgactccccgttggatctgtaaggacttgggtgcttgagtagtttctccctctttcttctacgccattaacttttctgtctctactaaatctttcccatcagcacataagcatgttgtaatttatgcaatcctttgaaacatgagaaaggaaaaagcaacaactacaaagaatctttctcaatcccatatccccttttaggtactatcccatttttctgtgcttttcccagaagaactcaaatagttgtctgtgcttgctgttcccaaatcctctcttcccactcattctttcttgaacctcaggctttttatgcacactagtccactgaaatgcctcattatcagtattgctgatgacctcatgttgctgaatcaatttcagtgttcccttccttaattgctctgaaggatttaacacagattcccactctctcctccttgataagctttcttcacttggcttccaggacaccatactctcctggttttcctcctgcctccttgacttctgcttctcagtcctgtttgctatgccccaggactctgtccttcaggcctcagacctcatctcccctcctgccatcctctctccttcccaatgaggtcttcctcgattgttttaagattgcagtctccagctccttcactccctacctactagaattgcttaattttttcccataaccatgtcagtatctaatatactatatatttgatttgtttactcgttgttttcttctccccgaaatgtaagctccacgaggttggcaattgctgtctgctctacactactgtatccttagcaactagatcagtgcctgcactgctcaataaatatttgttgaataagtgaatgagtggaaaatatccaggtaactcatgggtagcccttttcaagcactacctttatgatgtctcagttccaactacctttgtccccttgtgaatctgctgcaggttaacattcctagtaaaaagagttataatggtctctcctgggtaaggtccccacatctgtactaaggcggtagttggggactcacctgtctttcttgataggaccacatgtaatgggagaaagacatccaactggaaattttccaaggaaaaattggatgccatcattcaaaagatgccaaacaagtaaaaatgtcagctgtttataggagttgtgcttgctgaaattcagttttttgccttagagaattcctgttttatattagaagtttcaggtcttgttacaaattttaactctgtgatggatcttgtaagtgcctcaatagccctattatgcatcattatgtggaagataagaccatcatcataataaatacaaaacagcaaacagcattcagatattttcctaatacttggttacacagcttggttccccagaagcctgattctgtttttttgggagctagcacttcccaaaggcctgggctcccttcacagcatgtcttcagatgtcccctgggcccagaattgtctccagtggtgtttggtggagtgccgatggtagcttcttggttcaccagtcctcagaatccagcacatttaaacctgttttttttaagtcaccaggcaaatgtgggggggttcccatgtcaaatatgtctctcaggctaggtggttagtcaggttttcttgttctctgtattaaaagataatcttgccattttgctactttaagaactacatttcccttcataatagaactgccacttaaactgctttgcatgctacctagttatgagcttcccttccaaatgttgtctgtcctacaaggtcattctccccagccctaaccagattgttaatgaagcaaagaacactggcaaacatgtagattatcccttctttgttatgttattaatatatagtgactcttgacataaataggcacatacctacgcataaatttaactaagacgattgaaaacttctacaagagaaactacaaaacactgatgacagaaattgaagagaatacaaacaaatggaaagacaccccatgctcatggatcagaaaaatttatattgttaacaggacagcactacccaaagcaatctacagattcagtgcaatccctatcgaaataccaaggacaggccaggtgaaggggcttatgcctataatcccagcactttgggaggccgagatggatggatcacctgaggtcaggagttccagaccggcctggctaatatggtgaagctccatttctactaaaaatacaaaaattagccgggcatggtggtgtgcacctgtagtcccagctactcttgggaggctgaggcaggagaatcacttaaactggggacgcggaggttgcagtgagccaagattgtgccactgcactccagcctgggtgacagatcttgacactatcgcagaaaaaaaaacaacaaaaaaacagggacattcttcacaaacatagaaataaaaagtcctaaaacttatatgggaccacaaaagaccgtgaatagcaaaagcagtcctaagaaagaacaaagctagtggtatcacactacccaacctcaaaatatactacaaagctgtagtaaccaaagcggcatggtactggcataaaagcaggcctatagaccaatggaacagaatagagaacccctaaattaatctgaatagcaaaagcagtcctgagaaagaacaaagctagaggtatcacactacctgacctcaaaatatactacgaagctgtagtaaccaaagcagcatggtactggcataaaagcaggcccatagaccaatggaacagaatagagaatccataaatgaatctacacatctccagccagtttatttttgacaaaggtgccaagaatacttactggggaaaggataatctcttcaataaatggtactgggaaaactggataatccacatgcagaagaatgaaggtagaccaccacctctcactctgtacaaaaatcaactcaaaatggatcaaagtcctcaatgtaggacccaaaacaatgaaactactagaagaaaacacaggggaaatgcttcaggacatttttctgggaaaagattttatgaataagaccttaaaagcacagtcagtagaagcaaaaataaatgtggcccaggagtggtggctcatgcctgtaatcccagcactttgggaggctgaggcgggcagattgcctgaggtcagaggttcgagaccagtctggccaacatggtgaaaccccatctctactacaaaaaaattagccaggcgtggtggcatgcgcctgtaatccccagccacttgggaggctgaggcaggggaattgcttgaaccagggagggggaggttgcagtgagctgagattgctccactgcactccagcctgggcaacagaacgagactccatctcaaaaaacaaacaaacaaacaaaaatttgatgtcaaagtcccattgttaaaagtcttttacacaacaaagaaaacaatagaatgaaaagaacacctacagaatgggagaaaatgtttgcaaactacttatctgatctattatatacaaggaactcaaacatctcaacaggaaaaaaaaaaatcccaatacaaaatgggcaagtgatctgaacaggtatttctcaaaagaagacagatggcctgcaaatatatgaaaacatgttcaatgtcactaatcatcagggaaatgaaaattaaaaccacagtgaggtatcatctctaggatgactattatcagaaaggcaaaaaaataaatgctggagagaatggggagaaaagggaggtcttatacactattggtgggaatgttttccatagtacagccactgtggaaagcagtatggaggtttctttaaaaactgaaaatacaacaacatgatccagcagtcccactactggaaactattccaaaggaaaggaaatcattacattgaagagacatctgcacactaatgtttcttgcaccactattcatgataaccaaaatatggtaccaacctatgtgtccagcagcagatgaatggataatatgtggcatgtgtatatacacaatggaatactattcagccataagaaagaatgaaatcctgtcatttgcagcaacatggatggaactgaagaacattatactaagtgaagaaacaaagttaaatactgcatattctcactcatgtggaaactaaaaaaggtcgatctcatagaagtaaaaagtagaagagaatacatagaagtaaaaagtgaaaaaagaagttactagagactggtaagagtaggggaaagggaggatagggaaggatttgttaaagatacaaaattacagctagataggagaaatatagtctagtattttatactactctaggatgactataaatagtttcaaacagccagtaggaggatgttgaacattaacaatgaatgtttgaggtgatgcatttgctgattaccctggtctgatcaccatacattatgtgtagcagaacatcactatgtaccccatgaatatgtacaattataatttgtccattaaaaaaataaaatttaaagaagaaattgttttagtaatagttaaatctgatcttagctgaaacttaaggcaaaccttttacaaatatcttggtgctttttgctccttctaatttagttcctccttaggtgatgaggggaatccaactgaattcctaataaactaatccataaaggacccagaatagtgcctcattttttaaaaaagtttaaaggtaagttccaaagcaaaaattgtaagttacatgccagtaactttggcatgtaaggaggctgtccttgtatccctgtgttctttgggatttgacagcttgttgaaaactatactctctagtgttattgataaagttgggagcatctctgattaagctggctcagactgagccagactgaggtaaaggaatgggtcagcccagctggcatcattcattttgccatgtattaatatattaagtaattgctatggaaaaggcactgacttatctatgaggctaattatttatttccctattggcggtaggggagagcattggcccagcaggcaagaggttctaatcctggtttttactaactctttttatgtatgatcttaggctaatgtaccaggccttcagtttcttcatctacaaaatgaaagggattacttttgtatttaaaaagtatgtacacacactgcagtcaaggaaaactgtctagaagggtagccatcagtatcttaacttgggttttcttctcctggcttctttatttttgaatttttatgaaataactgtgtgtgctatttaaaaagttgtaattattttttaatgagaggagcagactctgtgactctgagctcccgttaacttcgaagacatctatgattttatacagcaggactgggtaggacaggacagtcaatccttggttattcggaaacagaatcccttttgtctgcttttgctccctgacttttgtctgctttttgctcatttgcatttttactggagagtaggcagcagagagaaagaatacattttagcaatgtagaaatggtggtaaaactttttatcttaaaaaggtttttgtggattttttttcattttaactagtattgctaatgacttttaagtacaccaattttttttctgacttccttagacattaattagttaattagtgacctttcctgttatatagaactggtttaaaataaaagaaaaataataataacaaactgtattattttgtgtgtgtgtttctgcattgtttttgtcctacttacaggtactgtaaggatccactgacttttcgtccattatagaactttctcttctcttttacttctccttcatctatttcagtctgtctggtatcctggcctttttccattaatctctctgcccaggtctgctagagaaggggttggaacactccattgctggttcttgtatgacctataagctaataatttttcttaacattttaaaataattgagaaaaaaatgcaaagaagagtaatacttcatgacacatgaacattatatgaaagtcagatctcagtgttcataaagttttattggaacagagccatgctcatttatttatgtgttacctatggcagccttcgagctaggatggcaggttgagaagttgcaagagaaccacatggcctgtaaaagctaaatatttactctctggtcctttagagaaggtctgccagaactcctatacttgagattccttttccattggatgtctcagacctaagacatgtttggacttgctaactcattcagcagctgttatatcacatgcctacagcatgccagacacactgctagacacaggtatccaaagatggacatgacaccttctctgttaggagggaggagctcacagcctagagggtagcatgggcctgtccacaggtgaactacactccagctctgtgtgctggtgccaaggtgtgagataggtgctggggaaactcaggaggaggactgtgactgcctgggaggtgggaagagaagtgggttatcattagataatggatagcaaaggctagatagcctaaagctgcatgttttctgtgctggttactttttaattataactctagaattgttccattaaagttaattgttacctagaacaagagttgtcataattttaacaagtgtgcctttaacatttcaattgcacattaaaaatattcctctattatagggtcaacattttacagagctatgtaagtaaatattatgtatagtgattttagtttcttatcaaaatataaatataaatatatataaatataattttattaaaaatatgtataaatttattttaacagttgctattggcaaaggggaatagacttttaggtcaaaatagcaattttcatttgcttttaagtttttgagtttttaaaaaaatgtttctcagaacatttaacaaaggcttaactatataccatagtagggacgtttggtttttgtataaaaaggagatcactgggcctcactcaagatttcctgaattataatggtggggataggcatgacatgcagggatttctatttttaataaactcccaagtgatttctatttacactaaagtttgggaactactgctaaggacaatattgattaaatgtgcatttttaaaattgttattaactttttaatagttatgtttttgtttttgaggcaaggccttgctctgtcacccaggctggagtgcagtggcgtgatctgagctaactacaacctctgcctcccgggctccagagatcctcccacctcagccttccaagtagctgggactacaggagcacgccaccaggcccagctaatttttgtattttttgtagagatggggttttaccatgttgcccaggctagttttgaactcctgggctcaaacagtccacccacctcatccttccagagtgctgggattataggcatgagccactgtgcctggccttgtttttgtttttgttttgaaacaagctctcactctgtcacccaggctggaatacagtggcacaattacaggttgctgcagcctggacctcctgggctaaggtgatccttaccctcccaagtaactaggactacaggtgtgcgccaccagacctggctaatttttttttttttttttttttgaaaagccagtctcattatgttgcccaggctggtctcgaactcctggcctcaaactatcctcccacctcagcctctcaaaatgctgggactacaagaatgagcccccatgctcaagcttttctgtcatctctgtcagcccctgaagtatactgcactttttaaaattctctaagacaatgtaaaggaatcctgattgtccaaaatgtgcacagtctccctcttctccctttttttattttgaaatagagcaaaatgcacaaaaaataatttggagcatacatacttgtatgttttgctataatctttcatgtatatatttatatgtgtgggcatatttatataacagctaacatttgtcagtttgttccttatccccaaatgttaacattggcatcctcttttggcacaccctgttcagttccctttgctctccagtggaaagcattaacatgaattttagcatatacccttttgaactatgttttgatactttaaaagggattattttgtgtgtccaaatatagacgtctggtatttgtatatgtgttgtaattttcataaatgctatcagggtatactctaatttttcagcttggggttttcattcaattttatttttttgaggtaaaaactagttcatctctttaaatgctgtgtaaatatgccacacgttatttatccctttcctcgtattcctaagtgcactgataggtgcttagagttgtttctaaagtttttaacattataagcaatgctgcagtgaacatccttgcaaacatccttttgcacatgtgtgagttttagtaagatgcatacctacctaggaatggaattgcatagtttttctagatagtgccacattattctctgtcatgactgaattggcttatatgcctgatagacttttcattttggatcgatggctagatatggatacagaatacttcagatggcacttaatgtgtcccaggcggtgctctaagttctgtgaatgcctcaggtatgtgggcgccagtatttcccatttaccatgaactgtaaaagagtggagcaggttagctaagctacaggtcttggagtggaggctggtggaattgtgttccaggccaagaattggaacagcttggctgaagacctggaatatcagggaagaaaaagaacccaggaactgaaggattaaatatcttcataggattacagatgggctgatgttgaaccacccagagagatctgacatagaaaaccccagcaccggttcttctcattgtcctcactggggctttggcaggtcctgcttatgataaaatgcaaaggctcttaaccctctgccacaagcctccctaaaaagggctctaccacctcagaagccaagcagcagcagacagaactcataaaaggctcaccgtagatgactaggactagggctcctggcttaagcaggtcaccgtggctatggggtgccaccatttctggcttgcacagatgacagggcgctgccagcgtctttgtggaaagtctctcttgaggatgggtctgaaatgtctgactgttgtgagcaatttctaaaagtaaactgtgcaatcaaagagaagtctgtctttctgaccttgggtctgcatagctattcggaccacctagagggttcgaaggccaagagtagggtggggctgtagctgttggtgcctaggctcttcttttctgggatgcagactgagcatatctcccctcccccaaccctggtttccaggaatctccttaagcccctgattgcctctcacctttgctgccagcctctaaaggccagttcatctctgcatgccctctcctatattctaccaccattgaaatgaacaaactattgtattttctcaccttctgtgagtggacaggaagaagggagggaggaagctagcaggctagtcaaccaagaaagaaaaaccttaacaaagtttaggttcctgcattacccagccaatcatgttacgctaactcaataaaaaatgaagtttcattgcagggaaagtaagtcaggacaccaaaatgatgtgttagcagggctgggcctagggcgaggcagaagagacacctgggtgcaaaattgaaggaggcaataacctgcaaccatcccgagagtgagtgagggcctctttaaatgtggcctgggtgtgtctcctgtctaactctagtcctgcccctgctggatttcaattcggattttggttttttattttggtcagtatccagacctgagtgtgtccgttttattccctcggctgtggacactgatggaccgtgctagagaagagattgattcagtctgcttttagtttgccatctcagactacatctggaattttatagcagttgggcggggtgggggaggttttcagataatagtattttgtttcagagaaaacttttcaggaatgtgtcttgctggtaagcagagacaattgacaattgcttctctcctattaacatcaataatttaaacctgtcctagaacttaaattataattgaggcaagaggcagatattcagacatattcattgaaagctggcctgtgtccaactgtggtgaaataagacaggtgggtttgattggcctaagaggtggaaaaatcaactttagagactttcttagcatctgagctctttgggttcttaaatactttcttgatggctgactggtgaaaccggtggttatggtagcatcactaaacatacatggcatttttatttcaagaaaccaaacttccagacatgcacctgatatcttgattgtgctctgcaaatgcagagtaatttccagctggatcagtaaaggataatattggctgtgggaaaagtgctaggattattactttatcttatcatgtgtttaacttttcctttgttttcacataactagtctgcagaaggcctgtctctccctcctttaacttgtgctctcttgggagtgcttacaagctttgtcatgtctgagtgcaaagtcagtttggaaatggtagagggatgggagggcacaaaggatctatagagttgggcaaccaaacaagttaggtggaggaagcctatgaaacattatttttctcagacatctactgtgaagtaagcgctttctcctttggagactgctagagcagaaacctccccatttttctccttctctgtttccagcgtcctctatgtgtctataaacacctttgctaccaggctacgattctttggtctttgtagtcggcacgggagaaaggcaggcagggagatcacccaggaagctccctttgccttttcagagttaacggtgctgtgcagctgatttgattattacatttaactgaaaaaacctgcagggtgtgccagacacgggacaaccagcctggtattgtcggccccatacaaacccttctcactgtcagaccggattaaacgaacatgtttttaaatatatttaccttgttcaggtcttggagcaagcacttgcttcatctcaatgactccttgggatattgttatgtgtacattggacctattttacctgtggactcgtttccctatagccttagcatggtaacattggtggaaattgatccagtggtgcagcgtgcctagggaaagtgagcttgtttgacagaagctttgcagggcctagggagaatctagagatagatgagatgcaggattctcctggtgcccaaagcctaggctcatgttgcctcacatggtcttctccctctttaaaagaccaagccagctgtcacatagctccagagcatctggatggggaggatatactggggagcctcaggagtatgacctacctctggatagtgggggaccttacactattcaaacacaagttcagatggccattctagtaggtgagtcctggtcactcttttgcctataagatgggagctgacctttatatgtaggactgctaggagcctttcacttattcattcttcaaatatggggatgcctattatataccaagtgctattctaggcatggggatatagcagtgcccaagacagagtccctgctgtcttagagcttaaagttaaattgaggcaagatgcagatatttgcacatattcattgagtacctactccggatttacgacctgtgaatacagtggtaaatttttttaaaaaatagaagtatagactaaatccattataaagataatttcaggtggtggtaagtgccctcaggtaagagtaagcccaagtattgaggatggacaaggagctgtgttaggccaagtggtcagggaaggctctctgaggaggtagcatttaagccatgacctgaatgaagtgagagagcaaagccctgtgaagaggtagaggaaggttcctccaggaagagggaacagcaagtgcaaaaaccctgggaaaggcacctgcttggtgtggaaacaccctgggcgtggtcacggaacagtaagatctgtgtggtacaagctgagtttgcagagctaagcaggggccagatgaagtggtagcttggggacctcaggaagaagtttgaattctgttctaattgtaatggggagccactggagggttctgagggtgtgaatggcacaatctgtggtgagggtgtttcttttcccaaggacacccagttgctctatggcaaatgagctgaacaggagctagtgtggtgttggggaggctgaagcagtagtgcagatgaaagacactggggcctggactagggtagtagtggtggaaatgctgaacagtgggcacatttgggatatatttttaaagataaggccaacaggattaaccaatgagctagatgtgatatgtgtagggaagggggataaaggatgactcctgggtttttggccttcactgggggagaaacggaggtcttgtcttgttttattgttgtggtggagtgggtgggtgttggggtaaagacaccaaaagttctactgagagctctcagcatacagattattctttcttgtatatcaaccacaggactgatgagatcactgagggcaggtctgtggatagaggaggagaggagccaggacagagtcctggggctctacagcatttagaagtgggaagaggagggtctggcagtgaagatgggaaggaacagcctgggatcagagcagagcctttggctgtattctagtcaggactcacaccatagagaataaaataaaatcaaactctggaagactaagcacgctgtttggggaatatattacttggttgctttaagacaatgacctatgttttccattgatgtaattggaaatggcacagttttgaagagtggaagtcctggagtcaaacagacctgagttcaaattccatttatagcacttaccagctgggggacctccagaaaattacctaccatccgaagacggtgaaaacagaggtgtccttgtttataaaatgggaagaataataggatccatctcagagtcagtgttgtcaagattgagttgatgcatgcaaagtgcatatccagtttctggcatggagtaagggcttaaaaatggtagcttttgctgggagcagtggctcacgcctgtaatcccagcactctgggaggccgaggccggcggatcacaaggtcaggagttcgagaccatcctgccgaacacagtgaaaccccgtctctactaaaaatacaaaaaaattagccgggcgtggtggtgggtgtagtcccagctactcgggaggctgaggcagaagaatggcatgaacccgggaggtggagcttgcagtgagccgagatcgcgccactgcgctccagcctgggtaacagagggagactccatctcaaaaaaaaaaaaaaaaaaaaaaaaatggtagcttttgtctgagtaactctttctctggatctgttgctggggacgtttgagagtttggaatactgtattttctactttgcatttttgggtcttgctttgctatttataacttctgtttagtatctgttgctggctcttagcatagtgataatgccgtgattgcttcagccttgacacttgtcccaccccccaagacaataattatgtcaccctggaggtgttaggaaaaattcttctaggatgaatgaattgagcattctctctggactgtcacaaaaatatggagttgtgtttactgttcccatccagaaagaaatgctctcatcactatctgtccctgctcagaagtcatgaggaataacaatttatgcccaagaatttatgaggaacataaaaaataataaaattagtttgaatttgttgaaaacctgttatatgtcaggtgctttagatatctggtatctactatcattgcagaagtccccaaaagcaaaaattgggatttttaatttacagaggagaacactgagattcaaagttacataccttgcccaaagtcacactgctaccaagtttcaaagtcaagaattgtattcatgtttctggctgagtcttgagcctattttgttctcactatactgtagccgcacataagcgtaattacagatctgaaaccaagaagatgggagttgtatatagctcactttagacatacctctccttctaaagtattttatttctctttgaatttcataaaataagattattcattttcaaatcacaaaagcctaactgatgttttcccatggcttctgtttaaaagagttttccttttctacagaacgtcacgggtttttgagtttaaaaatgaagggaagaggttgatgtagctcatttttattttggtattcatagctaaatatcatattctttaagcaaagattgtcactgtagagtgacattttgcattttgctggaccatatcgatgagttagagctaccaagaatctcagccgagtataatacagcagtcgaaggcagtctctatgtatcttggggaagctagagctggagactttttcttcgtcttcttcctttttctttttcccattagtcacaggtgtcattgtttcctagctatgagctagtttacattattaggccacggatcacttcctctggaaactggtttaccatgcagatatgatcctaaaattccggctgtatttctgctcaagcatacatcgcagtaaccggcctaatgatcagttttactcctgccaaatttatctttgtctcgttttctccccctttgctccactcaggcataccttgtgagatgagagagcaagtcttatgtctcttaatatctccagcatccattctgttgaccacatcataagagcacagtaaatattttttgagtggagaagaatttcctgtttaagcttttttacttctttttgttgttgtttggagacagagtttcgctctttttgcccaggctgaagtgcagggacacaatcttggctcaatgcaatctccgcctcctgggttcaagcgatgctcctgcctcagccttccaagtagctgtgattacaggcacctgccactacacccggctaatttttgcatttttagtagagatagggtttcaccatgttgcccaggctggtctcaaactcctgaactcaggtgatccatccacctctgcctcccaaaatgctgggattataggcatgagccactgcacccagctgcttttttatttcttaactccgattcaatatatctttctcccatcttatatctcagacttatccctctaataagaaaaccttgagatacttcatttgcaaaggttgagtttcaagtcattatattacgtgtcataaaaattaaggcatgattttagagcaaacagtgttcttcaagataagaggagacactctttagttctttccactttaaagcatctgcaggctctcgccgtccacgtcattgacttttatatgatgccaccagctcatccggatgcattcaaagtgtggtcaaaactataattgagtgggaatttaacaaccttcaaaagactctgccttaatgacccgactgtaggggacagattaattttcagtaagatttgggatcataactgtggtcacagtattccctgccattaaaacttaatcctagtttaaaaaattaaaaaataagtttttcactatatgctattaaaatagaaaaaagagaacaagaaccagacagatttagctgtctgtgcccagccatgagctctagattctcatcactctgtgctgattgattggcaatggctcatagaaatgaatttggaatgcatggaaaagctgctcaccctctttttgttcccttgagcggaatgcatggggtgcttatgggaaatctggcagaagagcaggggaaggtttatggcctgagtttccacagatttggagggaggcgtgtttttaaccaaaagggagccctgccctttttactgccctacttacagggaactctgccctctccagcgtggcatacaaagacatcttgtgatctggacactgcttcctctccagcctcgcctgtctccactccatgccaaaggctcgctgctttgggaataaccagctgcttgtagggcacacagtcacacctctttgcctttgcttatgccaacatctccgttagaaatactttctccgctgggcgcggtggctcatgcctataatccccacactttggtgaggccgaggtggaaagatcacgtggtcaggagatggagaccatcctggccaacgtggtgaaactccgtctctactaaaaatacaaaaattagctgggcgtggtggcgcgtgcctgtaatcccagctactcaggatgctgaggcaggaaaattgcttgaaccagggagacggaggttacagtgagccgagatcgcgccactgcactccagcctgggcaacagagcaagactccatctcaaaaaaaaaaaaaaaaaaaaaaagaaacgctttctgcacgggtagagtttcctctccctcaccccatgcgttgtgcgaattgtggtcccggccccggaaactcttgattcgcttgtttttcttcctctctgttagaggacaagcttcttgatgataggccccagtgtctatcacatcatttgtcccactcggcctggcctgcagtaggtgcttcatagaacatcctctggtggcagatagtaggggagacattcaccagttagtctcatatacatatgtgatgaaaaacagaggcagagcatagggtctctaatttggggataggggaggtgggtaatgtaaagaaattgagaaattagttgagaaaaaagagggggacaagagggaagagagttccagttaatggcatgtgtgaaggcaagcagtgtcacaggagtacagagaggaaaaggtcaaggtacagattagcttaggagaacgcgacagaggcaataatgtaactgcatatgatgatgaatttttaagccagataattagtctgagttttataactaggcaggcaacactgaaagtcagagctgactctattcatgctgtccctgtcccagactttgaggatagcggcagcagatgcagagcgctccacagcattggttcagttaaaccaagtgtttatccatctggttggatttgagtgagtgccaaaagttagctgaggattcccagccctgaagtggctgtgggtacgaggaaggaaacaaacctccttaaccgaaagaatgtcctgaatttcaaactcattggaaaccatcttggttgctcagattgtcttactttttaaaaaatggtttcttataatatttaaatagttttagctacattttccctattatgcaaggaaaggtttgacttcctaaggctgatagatttcccattaataatttttttcacaaagaaacaaggcaaaacccttgtttttatcctagtctttgactgtcagagctggcctttcagggttccttatggtatctgctaatggtggcttctatcacctgtaaaagaacaggagttgatcagatcttgtcatcagatatgatgataagaaaaatgttggaagaatgtttttctctccagagtatctggaaaaagaattattccagatggctatattaagttgcatatagccattcaaggaactagaaaacttccagtcccctctggcattactaaaatgacacaaacccattgttgatcatttttctagaattttgactgtgggggaaataaacttgggcctccatctttatttttagagtcttatacaagcaacttttgccagcacacttggttgggttcctgaagagatgagaaagtaagaagttgcttcaacgagccataaattgggaaataaacttgggactccatctttatttttagtgtatcatgtaagcaagttttgccagcatacttgtttgggtccctgaatagatgagaaagtaagaaatgacttcaaggagccataaattctaatcctgggttcctttcaccttggacattctagtctgaagagtgaaatgctcactgctctagggtttattagctggagattgagccagtctgccttgtattagtcaagatgttttctgtctttcttagcacttaaggctgctggtgagatgctttggctataaattttcttgtccagcctaagtccacatcttgagtcttccctctcgctcaggggtcttattactacagaactaactttagttgatatggaggggggccactggacatgactggttcttccagcactcagatatccatgaatgtctgcagccacattaaagttttggatcctccccgcctaccccctacctccactgtctcaaatatttattgatatcgcccatttggtgcagctcccgcaattcagtctgctgagttttacgagcttgctagatcatgttccaaaaagattcccaagcactaaagtgtttgccagggtccttggcattgtgactcatgtgtgttatcaggggcctcaaatatactatgccttaagatttgtgcagaattcagagtgtagtcactacctctttagagtccagacttctctgctaatgaggacctgctgaggcatcaagacattaaatatgattccttacatgcattcaaattaaggtgttgtaagcctcccctgttttctcacactgtgggaagccagagctgttgccacttgtgctataagaacttggttctttcattggaattaaaggaatttgcccttcagcaactataaaaggatgagtatctaactgttgtgtttgtttggaaagcagtttagtgccagacaggcatgcctaatagagttcaggagactgcagtccctcctaacccttttgtttactcatggccaaatttagtatatgccagcccctaacatctggcactgtgctccccataccctctccattgcagccatagtagccttcgagttcttcagacatgctctcctcctctgaccctagggcttttgtctgttacctatgccagaatactcctcctcatctaattaaccctggcccattcttttttttttttttttttttttttttgagacggagttttgctcttgttgcccaggctggagtgcaatggtgcgatctcggctcaccgtccacaacctccgcctcccaggttcaagtgattcttctgcctcagcctcccgagtagctgggattacaggcatgtgccaccacgcctggctaattttgtatttttagtagagacggggtttctccatgttggtcaggctggtctcgaactcctgacctcaggtgatacacccgcctcggcctcccaaagtgctgggattacaggcatgagccaccacgcctggcctatcctggcccattctttagaagagtgagtccttctcaaacatgaatcacctgggaagcttgttaaaatgcaggttcttcattagggctggaagggtcctgggatgtggcacttctaaaaggtctcacataaagctggtgctactgttcctcacggaatccttccctagtcttcagttaagtcaaaagttccccattttatgtgcttctgagattatatatctgtccttcatagggcattcttcacaattgcatatttccttttacttgtgccattttctgattaatgttcatcatttacactaaactgtaagccctatgtgtgcagtgaccacctgtgatctttgctcacgcttttgttttcagaacttgttatagtgggacatatacggttgtactatatatgtactaggatatacaggtgagtagatgatggttgtattggctgttgacagaatggttaaatatattgttctgagatgccatgatgatcataaaactcaggggtttggaccaaattgttaaaaaaaaaaagtggttatgtctttattattttcaaggtaaggacctcctataacatttaaatttcatgtgaagcagaaagaacccaagataatctgagactgaaaaaaactcatgataatgctgtaaataaagtttcggtgccgcaaaaggaatagcactcgaatataaaattttctttataattctcagcaaggcaagttacttctatagaaggctgcgaccttacagatggagcagcggtgagcgcacactttggcaagggaggggaaggggtttttatccctgacatatgtgatccctgccgctgtgtcgttcccctattggctagggttagactgtacaagctaaacaaattccgattggctaatttaaagagagtgacggggtgagtggtttggcgggaaaaatggttatgacagagcagataatcggaatgagtcagggggtagcaggtaatgggaatgagtcagggtggagcaggtaattggaatgagttagggtggagtaggtaatcggaatgagtcagggtggagcaggtaattgaaaaaggttgctttacgaggaagttaagtttaaaagtagaaggcaaataattgaacatactgacgtactgattctttgaaaataaatttaaaacttatatctaacaatccctcctcttgcatttccttacagctttctttttaaactttttaacgtgtcttggcttagttgttttgctggattttccaaaagaagaagcttctctggataaggtggaggatagttaagggaggttttagtaagtgccatttttatgagcctctgcaccaacccacggatgcatagtgtgacacagcacccgacaagaataagtacacccattatggctgcgagggaagtaagaattgaggctattattcttttccatttaccgaactactttctattcatgctgtaaaggggtcatttacccctgagttgttggctaactcattggacagagcagtcagaccttgtaatgcctttgttatacttccatcaggggtggtggtgttttgggatgaaggtacaacactgagttttaatcacgatacaaactcttcctctttttgctactatcatgtctaaggctatcctgttttcccaagccatctggctagtggcccctaattgcttagctattcctttaacaacatctctagtgtagttagtaaatcactgttggttgtaatagatctagtttatccaatctacatttttattaattttcactcaccaaaatattgactcaaattctgcagctattttatttcgggcttgaaattgttctggtattccccatgggactctaattgtgtctaaatagacgtaagagttgaaagacccataagggccttctctcgcttcacgatgtcttatttttttctttttctggttgatgaaatgccagggtgaaagggatagccaattggactaaagcataagtgccactccagttattcggcagagtgtccagtaaaggtccaccacaataccaccacacatccgtttggggatgaacaagggctgactgattgatgagctcttgaaaattcttaagctcactgcatcctttcaggtctccaaggaacactaagtttcctccctgtcgtgaacttagtgttgggagacggaagctggatggcccttgggggctgacccgcagggtgccggacttcgggatatagcagagagagagcgtggcatgacttgttactccaggctgtagaatcctgggaaagagctaccatgcagcccatgcccggttgactggaggaccaccctagtggaaaggggacagtctgggcctctggcctgctgtgcgcacaagcataacaattgcttttgtttaacgtgtgaatggaatatttgatccattccaaccaggcatttgcatcttggtatcctgtcttaattgccaaagtttgttttaagtctttaacttctacgatagctatctcagtcgtgtcattagatggagaaggagcaattgttcccttgtgagaagttttggaagaaggcttagaggaaggtgcaggtggcgggggatcaaagaaacgcatttcaaataatctaatagggtctgtccctgaaacctcagcccccatagaagaagggaactggcttagaaaagggggagaacttgagggtttgagataataacctgtgtagaattacactgggttagctgatgggggagggctgtccctctagtaaaatgaatgtatggttttaggaaattgcaaaaacctgttggcaattcattcttgctctttagtggtccgcagaacattggaccaactacatcataaaagctttacattggggagcaagactcctggttgatactggggtctttatcgaaatctccccagattaaatggtcccaattcactaatgcccagtcttaggagactcaggagggacagaggtacttttctgaagtagagagctgtctttgacttggtcagtccccacagggtataacaagacaagcattaaatgcaatagtttgaggcaaaattgacttggttatgttaataactagatggtcagcaatagagcgagtaaagaaaaaagagtaatagaatagatgaatgaaagttaaatttcttagctttagtttggtagggttttcccctgggactatggcccacgactctggagggggcggcgctttcttgactcgggtgtgatgagtccatccgctttccgctgtatgaacagcagtctcagtggttagcagcacaaggtagggtccttcccaggctggcttgagttttccttctttccaccctttgatgagaacatgatcctcaggctggtgctatttaccagaaattctagggttggtacctgtgctaaaagacttagttttgcgggaaaggaaagtggaagataaaccaagtatataatttctaagaaactgatcttttgttttaaatgtggggacatcagcagtggactttatagtccttggtacctttttactgagaaatttcctttagcacctatttttattagtttctagaccaaagaaagccaaacaccattttatatttgacagtgcttcctgtatgacttttataccagataaactaaatttcacctttatattaatgtgttattaatgttaaactcaattttaattaaaccttgttgacatagttatccaattttaacatctgaccataaggtaagatttttatagactctttttaaccttttataatttttgttaaagagcaggttagtgctttaagaaagacctgttgtgcttttattttaatatccagttcacggaaaaactggataccactttaactttagccaatatgtttacacacggaatttcctttacaatgaatgtttcaaaacttgcttaaacctttaaaacaaaatatatatttttaaccttttaatgtaggtagaaatccacattcttatgcctccttataatccttttaccaaagttttattttactttccttatacaccttgcacataaactgtttcttcaatagttttacattcaggaggcctaattacttttaaattatacaatatttcttgcataaattcccttttataactttttttcatgacttttacagacaattcttcgacatgcctcaactttctgacttgttgcaaacatccctttgtttttttttttgtttttttttttttgagatggagtctccctctcgcccaggctggagtgcagtggcacgatctcggctcactgcaagctccgcctcccaggttcacgccattctcctgcctcggcctcctgagcagctgggactacaggcacccgctaccatgcctggctaattttattgtatttttagtagagacagggtttcaccatgttagccaggatggtctcgatctcctgacctcgtgatccgcccacctcggcctcccaaagtgctgggattacaggcgtgagccactgcacccggccacatcccgttctttaaacaaccagttaatttattttaggataagaattcaccatataacattcctttttacataaattctcccccccccacctttttttttctcaaaaatgataaccatgcttttccaaagtgaacttccttcacgtaggtggactagactgtctaaggccacaagattagaagttaggataatacatgttacactgttaacttttagcaaactttacttttgttgaaaaccttttaagtttgggatttcaattattctttgctattaataagacctcgttcagtccatattaacttagaattggtatagatggctctttcctgattcagtaagcactttaaggcttgactgagtgcaaacagctcccacgtctgagcagaccaattattaggcaattttcctaactctgcttcttcaagagtttccttatcacttactgaatacccactgtgtctttttccctcaatcaccggggaggaaccatctatcgtcctgtcctgaagggagttcctcctaggtctgctcggacctttgtatggtaattaagatttagatcccctgttaggaaacctgctgggttaagggaatttttagtggttaatgttaaatcatctttttctaacagaatagctttatatgttaaggttcttgagtcactaagctacctttttgctttttttttttttggacttagggtagttctgatctgatgaggtgtgctcacaatgaggtttcctctaaaagtctttttagactttctgctttcttctgttagcaaagcagttgccgctacaggttgaatgcatttgggccatctgcgggttactaggttaaagatttttgataggaaggctactggttgtcagtggcctcagtgctttcgggccttgtttacactgacaacaaggtggtattggagtgttatagggtcaggagaagaccttcaattatcaattataggttttaaatttaccctggattttaaaggaatagggtacactgttttctctttactatttctatctctctctctttctttctctctttgactttctgtctctttctctctttgactccctctttgtgtctctctttctctctctctgcctcactctttctctctgtctttgactccatctttgtctcctcctctctctctctgcctctttctctctttctttcctctctctctctctttccccctttctcctctctgctagtctttccctgcctctgccaaccacttatgctactgttctcccctctccttccccttcccctaggggagggaccagcgggagtggagctactctttcttcctctgagaagaaaggaaaggggggttctgaatatttttcttactaccagagatttttgtgaggttcaaccccacaccatggggatttctcacctcttttagaggttcaactcccacttcatggggattactcgcctctttttgaggttcaacgcaccccatggggatttctcacctcttgttgaagttcaacgcccccccatggggatttctcccctgtttttgagattcagctcccacctcctcatggggacttctcacctctttttaacctccaagacatcccgactaaggaatacttcaccaccactcccccgcccccgcggctttctttccctaatcccgactaaggaatgctttaccgcccctgcggtttctttctccttagtatgtcctaaccaaggaatgctttgctgcgtggtgtctttttccttagtccggaccaccaaggaaataccttactgcctcccgtggcatctccttccttggtctgtgcacagagtcgttgccacagtatgtgaggatcctttaagctaggttgctggtcagtttcttttttccctcgcgttgctgagagctcaggttattcctcgcactgggtgggtcttgatttctcacccctgaggctgccacaagggggtggggtgcacctcctcacgaaagagaaccagagaccgcccccagaggggaacgtaatcccagagcagcccctaattgttatatgtaaagtttcagtgccacaaaaggaatagcacttgaatataaaattttctttttaattctcagcaaggcatggtacctctgtatagaaggatgtgcccttacagatggaacaatggtgagcacacacttggacaagggaggggaaagccttcttatccctgacacgtgtggcccctgctgctatgtcattcccctattggctagggttagacagcacaggctaaactaattccaattggctaatttaaagagagtgatggggtgagtggtttggggggaaaatggctatgacagagcaggtaatcagaatgagtcagggtggagcaggtaatgggaatgagtcggggtggagcaggtaatcggaatgagtcagggtggagtaggtaatcaaaaaaggttgctttaagaggaagttaagtttaaaagtagaaggcaaagaattgaacatactgacatactgattatttgaaaagaaatttagaatttatatctaacaataaatagactcatgtctcttggttttaattctgtgaaaggaaattgtaccatatcacctggacttttgacttatgggttctaagataatatattcttacatatatacattcattttagatatattcatatattcattatatattactatataatatatatgtataaaaacatatatacacagtcacatacaatttttttattgaggtgaaattcacttaacataaattagccattttaaagtatacaattcaatgggatttagtacattgacagtattatgcaaccattccctctaagtcaaaacattttcatcactcccaaatgaaaccctgttcaagatactatattcttaactcagcagttctaaacctttttgtctcagcacctctttacgctcttaaaatttattaaggacttcaacagcctttgtctatgtggattctatctgtttatgttttacagtattggaaattaaaactaaaacaattttaaagctttatttatgaatttattaaatgacattttacatttttgtaaatctccttaatgtctgacttaatggaagatgactggataaatcatatcttctttttttctcaggctggagtgttgtgctgcaatcttggctcactgcaacctccacctcccagctgggttcaagcagttgtcatgcctcagcctcctgggtagcagggattacaggcacccgccaccatgcccagctaatttttgtatttttggtagagatggggtttcaccatgttggccaggctgtctcaaactcctgacctcaggtgatccacctgcctcagcctcccaaagtgctgggattataggcatgagccactgctccaggcctcatatcttcttcttcactcaatctattgtcatacaaaaatcagtcctagcatatgcatatagtcggaaaaggaagaaatatttttagtagccttttcagataattttggatattctttttttaaaactctaccaacattcaacaagtggtaattttttaaaaaaattattacaatgtgaaaaaataaaatcatgttagtgaattgttcacatgcagttacattaagatctattgacctaccttgtactttgagtggatcttttacttatgcatgattttttcttagcctacattgctcatttagaaaatattagtaaactgcgttatgcagatcttccaatgcaaacatattacatcatataacatcaaaaaattacatttgttaatatcaccacttattttaaaaagtcattaaatattgggaagttgtcatgctcgtggtgcagatccagattttctaaaattatgacgttttcttgaaagcataaattttatcattgcaacaaatattactgttttccttaaagtagacactcacttggttcatttctgagaaagtgtctgccaaatacccaagtgtcagtaaccatattttgtctgtcagttattcttttacgtttacatggtgtttcatgaaaaaagaggttcagcttgcaactcagtcgcacaactgctttccctcaagtcaacttcagtatgcagcagaggtgctttatgcacctttcctccttcgttattatataaaaggtgtgctaaagggtcaggattaaataaaattaataattttgctcatttatcaagtaaagctaggctttttttttttttaatctgtgagtgtgtagcagtgaagaatacaatgactattggtataacttggtaccactgtctagattcatgcgaagcatcacagttcaacttatcttttttttgcatctcatggaacccctgaagggtgttggaaacctccccgtagttaatggaccaacagagaaccactgtcctaaagaaaataaaaatcacaaaatagctttgtatggcctagagaacataatatcctcattctagccacctcttaaaagaagcatgtctgggccgggtgcggtggctcacgcctgtaatcccagcactttgggaggccaaggcagatggatcacatgtatctccattttctggactcaaatacagaccatgcgcggtggctcatgcgtgtaatcacagctctttgggagaccaatgcgggaggatcttttaaggtcaggagtttgagaccagcctggccgacatggcgaaaccccgtctctactaaaaatacaaaaattagctgggcatggtggtgcgtgcctgtaatctggggtggggcaggggaggcggctgaggcaggaggaccgcttgaacctgggacgtggaggttgcagtgagccgagattgtaccactgtactctgcactccagcctgggcaacagagagagactccgtctcaaaaaaaagaaaaaaaaaaaaaaaaaaaaaaagagcatatctgactgtaaagtacaaatcagagggaaattccctgtgagtacattcaggtaactttacctaattctatagaagtcgtcatttaccttcctgagaatttgacaaattctgttgaagcagagctaatgtgaaaattgccttatgcaatggccgggcgcggtggctcacgcctgtaatcccagcactttgggaggtcgaggcgggtggatcatgaggtcaagagattgagaccaccctggctaacacggtgaaaccccgtctctactaaaaatacaaaaaaaattagctggatgtggtggcaggcacctttagtcccagctactcgggaggctgaggcaggagaatggcatgaacctgggaggcggagcttgcagtgagccaagattgcgccactgcatgccagcctgggtgacagaacgagactccaactcaaaaaaaaaaaaaaaagaaaattaccccacgcaacctactgatgtctaagattttttaattcagatgtctctgacatatttcatttggtgacaacgttcagtgggacatattttgtattggttgtaaaagtctggaggtttttttaatgaattatttgtagaattccaatttttaaaaagttgtagttctgccttggaatcttctcagaattccatacagtttttactatacagaagaactcttcctttataatagcgctgcctcaattttgttctacttgagaacctaattaaataatttggagtttcaagcttagaattctcattttaagcctcctttaaattcttgttctacagctgtgcttgacatatttgaccataagttctaatgttagggttcagaccatgtattcttctttaatatttacattggatagcataactgttaaatggtattttaaaaagccaattccttctaagcatacaattccgcaatgtcattttaacaataacgtaggtgatttttttaatttttaaattaaattttgttatattttgtacaagtatgttactcttaatggtgaattcaagtttgacttaaaaccagttcttgggaataattagtatgggaagtttaattgacagtaaggtcagcatgaaacaacagattgatcaatctaccctcaaaagctagtgtaattttaatctacattagctgaattattttatctagaaaagagaaagaccaattctttataatattatcaacagtgggtagacatgataggaaaacaatattcagcccataatattgcaaagagaaaaaaacatgaagattggacttgaatcatggatctgttctttcttagctaggtgacaaccttgctaagtattcaattcctccgagcctcagttttttcatctttcaaattggagtaataacttctccctcatagaaaatgaatttaatagtataacacatattaagaaattaacacattgccttaaacttgatgaacattcaataaatagggttagtgttaaagtataactttaaaaatattttttaaacatgactttgtgaaagtatagtatagaataaacacgtcaaaggtctatgaggctaccagtagaaatagaaagtggcttcaaaagaggacagcagaggcttgtttatatgtccaatgaaagacacaatgctgaaaaaaggtcacaaagtttgatttaaaactggttaatgttctgtagggcaataaaacctcaacttttgagattatcttttctgctggacagaagttatttgcatctctaccagacaaaaataatttgcaaacataccaattttaacttagtttgatatctatctttgcagaagctgagtcttcattcatagtaaatagcgtaagttaagcaaaacttacatatccctaaaaaattatattcccagaaagtaaggacctaagctgacaacatagctgccctgggcaggtggggggcacaggtagaggaatatagaattgccagtgttggttaacttggatttcaaaaccatgtgagaatgagggtgagacatggggaccacttgtggggtggaagaagttggaactgagaccctaccttaatcagggatccttgacaggcctcaccatcattgaaaggatggacgagataaaaaatctactttctagcacagggattcaatagggaatttatttttctatctcagcctggcatctgtaaggaaatttgtaaccacattcaaattcattttcgcagtgtcactcagtgatacctcttgtatactcactctgtgtgcacttaacctgtgttatttaggatttccataagtgaagttcctctgctgataagtccaaaattataaacacacaaggaagtaacccaccattagctagagtggtggcaatagcgggaagcaatgtgggggaatatcaaaacccaagaacttcaagaataaaatcataatagaaaaattccattgagaccataaaatagttatgtttcaaaaataaaaacaataataagggattaaaaccaaaagaacaggcatatttgaaagaaccaactagaaggtacagaaatttttaaatattgttgaaattaaaaacatagctgatgcaataaatatcagactaaccaaagtagatgcaagactgagcaaacaggaaaataacttcagacaatttgccagaatgcagtccagggaaataatgaaatagaaaacacttgaagatacatgaaaggcagtatgagaaggtccaaaatatggctatgggagctccaggtgagactagagcaaatgggaagaggtcatatttgaagagaatggctgagaattttctaaaattgagagacgtgaaatatcaggttcagtatcacagccacttctgaaaagaaaaataaaggtaaataagtccacacaaatactcatcctagagaagctgcagaatacttcttgtatacacaaagggaaaatccataaagaacaacccttgaataataaataagagccaaacagccatggcctacattgtgtgggaaatagcgaaggaacatccagtcactagccttatccttggcaccataaatcctggtaacactagcaagttaaatgatgcagactttcttctctgctgtgaaagtagttttacaccaacatcccgtagatgtgggatttacaactggacattgtttcttgtacttacggtatcacctctgattttcagcttaatcacctcccatggtgtgaatttgggaagcgtagcttcctttcttccagttttaggttttggacataaaacccaggtagtcactgcttggcagtctccttagggactctgctggctttgtgggcaggaaatgaagtctgtttaccttaggcatgcacttgattttcataaggtgctcctttgcttctcctttctagtatgaatgggtacatgtatctccattttctggactcaaatagaggccatgcacggtggctcatgcctgtaatcccagctctttgggaggccaatgcgggaggatcacttaaggtcaagagttcgcgaccagcctggccaacatggcgaaaccctgtctctactaaaaaaattgaaaaactagctgagtgtggtgacgtgtgcctgtaatctcagctacctgggaggctgaagcaggagaatggcttgaacctgggaggcggaggttgcagtgaacaaacattgtgtcactacactccagcctgggcaacaaagcaagactctatctcaaaaaacaaacaaacaaacaaaaaaccaaagagttctgaagccattcttcacttgagaagcatcactgagaatgcgtcatatgccagaacacctctctcttggatcattgcaagagagttaggaaggaatgagaatgagtctggcaggaaggatgcatttttagagatgagggcaaaacagaaaattactctggttcgagtgtgtcatttctctttctcataattttttgtttcactttcagtgctggggaccaacaggtctcttgatgtagggttgtggccccatacaccttctatttctgctcagggagtgggccttaaatgtgtctttcctgggccttcatacagtcctcactctttcctttggtttttattaacaaaaggtgattgttttcttagctctttgggggtgactccttctcatcaggtgtcaccatttctgatttttttccctctcctttccttaacatccaaccaggcagtgctttggtgtttgtcagatataatgctcttcaggtaatatctttctttaattacttttcccttcttttttttttttaatttccctgaaacagacacacacactgttgccttgaacaattgcttcctacctccctctctctgggaactggattaatttttttgtcattgcttaatggaaatgtcgacatttcaatttctgctgcatgttctacacaaaatttaactggacaagatagggagagaagctggagaagggaaagttcgtcatatgacataaaagctttttttttttttttcttccataatggcttagagtgtgccttccttaaaaagggggaagcagctactatggcaacaggttctattttccttaggggctgtggtggcgctgatagaactggagtctggagaacatgaaacaatagccaggagccccaggagcctgcagcatgttttttttgtagtaattactagccttttccatgattcaaaactatgtggtaagtggaactgggtaggttggtggtggttttgtttctgagtgatatagacagcaggaccgtgagtaagggaccctctctacatctcacagagaacccgtacagtgcgcgcctggctggggagactgctctgctccagcccagatatccctccctcttctcttcacttcctgccttccaggcctggggctccctcctgataaacttcagtctgttccactagcaagtaccagagtgtgagtctcccctggcaggtcttcctagaaatgccacctccatttctttcagaggtttcccttcattaaagacctcagtgtcggccccaaacatgcagaaaaggggtgcttgtttgactctcctagaacaagttcttatcagaggcaatctttttcctcccctaactcagaatgctgatcctcataaagcttgagcaacagtgcttggttctgctaatcactgctggacccatgccggtcacacaattaaaagttggcgtttgggactttgtggcctggttacacccctgtgcctgttgcgtcgcccatccgggctctagggagacagagactctttcattgcacagctcatgaaataccagaggagaaagcttgctttcttaccaaagcattcttcactaataacgttctctgcatatactccaatcctgcctctttgaaacttctgtttaaattagttctcctcctccttctccttatcattgtgctttgtacagcccttgataattttcagtacttttttcacctcccttgcttgctttgtccttacagcatcccagtgcctctatgaaatagaccagggaagaggcagcacaatccatttttggtctctgtggtagccacaaacgtttatataatgcctcccaagtgccatggtggagtctggtggagtctgcccagcttcacaggggggatctgacatctcccaactatttttcttccccatgaaaatttgtgaaagatatatggattataaacacaaggataccttaataggtgtagagctttattaaatttttaaaatgtagaactaaggtgccatccttgcctggtatgtcgtcttctttacctgttcttttgatttgctttgctgcagactaattgtgcctgggaccttaaaagtcactggatcagtagacatgggaaaaagttcaatatcattactcttcaaagaaatgaaacttttaaaagtcaggaaacaacagatgctggagaggatgtggagaaataggaacgattttacactgttggtgggagtgtaaattagttcaaccattgtggaagacagtgtggcaattcttcaaggatccagagctagaaataccatctgacccagcaatcccattactgggtatatacccaaaggattataaatcattctactgtaaagacacatgcacacgtatgtttattgcagcactgttcacaatagcaaagacttggaaccaacccaaatgcccatgaatgttagactggataaaaaaaaaaatgtggcacatatacaccatggaatactatgaagccataaaaaagaataagttcatgtcctttgcagggacatggatgaagctggaaaccattctcagcaaactaagagaaggaacagaaaaccaaacactgcatgttctcactcgtaagtgggagttgaacagtgagaacatatgggcacagggaggggcacagcatacaccgggacctaacagggggtagggggaagaggaggataaccttgggagaaatacctaatgtagatgacgggttgatgggtgcagcaaacgaccatggcacatgtatacctatgtaaccagcacattctgcacgtgtatcccagaacttaaagtataataaaaatatatatatatacacacaatggaatattattcaaccttagaaaaggagatcctgctatttgttacaacatggatagacctagagaaaaaaaaaaagagagaaatgaaacttaagataaaagctttcaaaatagcaataccttattttggtgctagtgaaagcaccaaaaggaaaaataaaggtcctagggaaatgggcatattaaaattttctaggtgggaatgtaaattgacatagatctcatgggtgacagtttggtaatatctattaaaaatatttatgctggctaggcacagtgactcacgcctgtaatcccagcactctgggaagccgaagcaggtggatcatttgaggtcaggagtttgagaccagcctgaccaacatggtgaaaccccatctctactaaaaatacaaaaattaccctgcaggtagtggcacgcacctgtaatcccagctacctgggagacagaggcaggagaatcgcttgagcctgggaggctgaggttgcagtgagccgagatcacaccactgcactccagtctgggcgagagagtgagaacctgtctcaaaaaaacaaaacaaaacaaaaaaagtatgccctttcatccagaaattctatttctatgaatttattctagggaaagaaagatatatgcacatatttgtgtacatagagattcactgcaatattagtggaaacaataaaatattggaaacaatctgactgtccaataacgggagatttctaaattatcgaatacccatacagtgaaacactgtgccaccataacaatgttgagtgagacaatgaatggtacttgaaaagttcatagtaatgcagtaaaaaacaagttataaaactaggtgtctgcagtatgattccaacttgatttgaaatatgagtgtgtgtgtgtctgaaaaaaacatggaatgtgacacgtataccttaaaacattgaataacatttagttatttctggatggtagaatcactggtgatttttattttctttgtgctttgtatcagttattccacagtaaatactttcatttatcagaaaataaaagagaaaacatgtatctttttttccccctaacgatagcactgaaagaaagagtaaagggtaagctatttaaaaataggcctaatcggctgggtgtggtggctcatgcctataatcccagcactttgggaggccaaggtgggcggatcacctgaggtcgggagtttgagaccagcttgaccaacatggagaaaccctgtctctactaaaaatacaaaaaattagctaggcatggtggcacatgattgtaatcctagctactcaggaggctgaggcaggagaatcgcttgaacccgggaggcggaggttgtgtgagccaagattgcgccattgcactccagcctgggcaacaagagcgaagctccatctcaaaaataaataaataaataaataaataaataaataaataaataaatataaaaataggtctaacctaaagaccaaactgacattagctaatgtcattacatgattctgtcttaacgaagatagaagcattttattgcgtaagttttcttctgtgtgtgggaatcatatgtgggtgtatatatgtttaaggggtatgcatccgggtagacgtttgtgtgtggacatgtgtgtacaggtatataagtacatgtgtcatagccttggtacaggtctcatagccttgcagcactgtgttcctggcgggagtggcatctgtctgcatgtctgaaaatgccacgtgtgcattctgctgatcaccaaggttcgtggctgtaggcatcctctcttcagtgcgtcagaagtctgaagaacatgtagctgcaccggggcgttatgggaaagtaacgtgtaggatttattaactcatttcttgaagccactcactgtttgtttttaagtaccaatttttattttccattgccaaatagagaagagactttttttggtgagtacaagtatgagtgatttttttttttggtcatttttataatgaactatttgaatcctgacttttcgcagagtagcaggactccctgaactgtgtttcttcctctccccacaagtttaccaagcccaaagggtctttttaaagggtgactttttcttttgttgtttgtcttgtttcccacccttacttaatgattacttagctctttatataatccagctaaatgctggtacatagcaacaggattgtggtgtggctttctccttgatgtaaatttctggaagatggccttctgtatggaagactgagcagtgggatctattagtgacatgtttttgggaggagctgcttcctaaatgggttgaggctgcagagatgggcaggaggagcagccagaagccacagggtgttcgcatcattgtgcgggtaaccacatggtggcaacgattgcacagcttccagttgtacttagcagctgttgacacagacttcagaattcccatggaaaaggaagtgaactcctttggaatacaatgcattgggcttttttttttttttttttttttttgaggtgatgtctcaatctgtcacccaggctagagtgcagtggtgcaacgtcagctcatggcaacctccgcctcccgggttcaggcgattctcctgcctcagcctcccgagtagctgggactacaggcacgtggcaccacgcccagctaatttttgtatttttagtagagacagggtttctccatgttggtcaggctgctctcgaactcctgacctcaggtgatccacccacctcggccttccaaagtgctgggattacaggcatgagccactgcacccagcctgggcttcattttaaagcggtctcaggcaggcattgctgatgcttgtggttgaagatacaacttattattgcctaggtgtatgagggtgtgatttgttgtctgcctctaggctgtagacttctggactgcactgtttgattaatgggctcagctcacaggtctcttccctagagaggccttcctggcctacctaagttggtcctcttaggttttgtcatatacctctgtttgatttcttcatggcacttctgtaatctgacatttttactgatgtatctgtgtgttatttgccgtcggaatgaaagcagggatcttgtcagtctcgttcacttctttatcccagtgcccagaagggtgcatggcatctcataggtgttcagtcggtattgggtgtgagcatacttggtgtgtttaggaacagacagaaggccagggtagttagagctctgtgaataagagcatggtggtatgacatgaggttggaggggtcagtaggcaggggctggatcgtataggccacgatgaggtgtttagatttgctcaaggatctggtattcattaagtggtttcatctctgtagatttatatactctccagattggtctgctaaagtcagttactgatggcttttctgctgggaattgtgcatcattctgtccttgaagtgccactgtagcctacactgtatttctccccctatctcagctgccatcagcttggccttcttcacccaccttttctgttgagccaggcaaagcaagatgacagcaactaagatgtcaggctgtgatgcctgcacaatagaaagcattttagaactttgtcattaaacactttgacttcccctttgaaaaatatctgtttaggtttgggctttgtgagtgactcttgctgagagtgtgaatgttgggtggatcagggacccagatctcgacttcactctgaatcgttcggtgtctttgttaccagacacgatctgctcttctctgcctaatgatagttggtttgctcaccttggatctctggtttctgttgtcaaccctgtattttaaaatttgctttcatggtagcagaattcaatgagtttccagctttgtgccacctttgaggaggataaatcaggttttgctttgcatgtgttgaagtaagaactttattggcttcattccctgacaaatctatttttgtgattaaggcaataaatataacagaagggtttgtgtgttcactctaatcctcacatgtaccactatatataaacactgttattttgtatggatgaataaataagaggaactgttgtatcccttaggcttgaacttacattgaaattttaggagataatgatttagtgcagcaaggagctaggaggtgttgccacagagtttcaggaggagagggatataaaggtgtaatcaattcagattgtttctaacttttatggattgtgaagatttgtattcctttttcagtggattccattcattagcgttagacatgtaaacatatggaatgtggatgtactataccagtaattttcatggatgttagagctctaggatgtttttcaccttttaccgtatgaattgacctccagaactttcccatggggtctcagctcttgtacatgaagagcataaacttttctggacaccatacattactgttttttttctgtcttctaatcaaatatccaaacataatctaaaagtaccgtgacaggacatataggtttgtcaattccagtcactttggtagactggcccttgaaataaagctaacgttttcaacttcagcctcccagtgttttttcagacttatggcagggaatgtaattttctgtttgctttttggggtgaaagtacattccatttcaaaaatatgccagtcacatgagttatttccctcatttaaaaaatccccacaaaaggagataggttacctagggtgggtatttcatgagtgtatgcttctttatcagtctgtccatctctctgtaacatttcccatgaacccttctgtggatttggaatcttagtccttccagaaaggattatggtcatgtccatagaagctgcaatgagatttacatctcttgggaagtgacaagctctcagcgcaagctctcagcgctgggtcccagagccactgttcctgttggagctaagccacatggctaagggccagtcccttaacctttgatttagctccttttgtccctgtcctttcatctgtaaaatggtgctagtaatgtggatctggtttcagaagactgctgtttattttaactaattaaagattgttacaatggtgaaattcaatggactctacaaatattaatattggtgctgatcatgggtggctattagctgggtagcaggtaactcgcacctagaagctcttacctgctctacgccccagttcaggtttggctaagattctgttcttccaccaggcttcccagtagaggtctccagcacaatgaccaagaggaaaatgggcaacaactgcagaaacctatgaggttaacacagatatataggcgcaaaggcacagggcctgacacattttaattaaatatgaacagtactgtaatctggtttgtacatgtcttgaattctcttattgggttttatgctagcttgtaaagttcttatctctttttggtttttgtttgtttttgtttttgtatttttttttttagacagcgtcttgctctcacccaggctggagtgcagtggtgcgatctcagctcactgcaacctccatctcctgggttcaagccattcttctgcctcagcttcccgagtagctgggactacaggcacaccacattttgtatttttagtagagatggggttttgccatgttggccaggctggtctcaaactcctggcctcaaatgatctgcccacctgagcctcccaaaatgctgggattacaggtgcaagccgccacacccggccatatctctctctctttgaatgttaagcaacctatggaatttcagcatttaggtcttagttgagacctttccgagtctacagagaggatgactaatactgttacccctctgatcagaattttctaattgcttttcatctcactcagtcaagaacaaagcttttacagtggcctgcaaagttttccaggatttgccaccctcaagtccattatgtctctgacttttcctgatacttgccctcttgctctctgggctccaggtacactggcattaccagcatgccacccaggtacttaccccgaggtgtttgtacctgctgtttcctctgcctgtagctcccttcccagatgtcctcatggcttggcaagacatgccttctccatgagatgtccttgaccaccagtctaaagctacaaacatttcctctatactccccatccctttcatgctggctgtttcatcatagcaccatatattttctttgcttatcgcctgtcctactccaaaagaatgtaagcttctctaaggcaggaaactggaggagtctgtcttgttcaccagtatatctccagcacttaaagcagtccctggcacacaaggggtgctaaaaaatagttggtaattgaaaaatagatgttgcagttttggcctttgtgctgggtcaccttgcactttcttcgttgggtagaaagtcccaaagcaatgtctccatggcttgcttgactttgggacaatgttagcttaaaggtagtaggttgtgtggttgaaggaaatgtcagtaacaacaggaaccggcatttgcagcacttggtaacaccagactggcatacacatgtgcaacttttaaacctcctctatttaccctctggcatctttttctagatgtgagaactaatcaataaatcaatgataatgaatgtggaagcattttataaactataaaatgctttgcaaatgttaattacattggactttagaatgaattgttatgtaatttaaaatagttaagtaattttccaggaagaaaggctttctgagtcagcttctctgcacgtctttttatatgtgaatgctgctcttccccatctgcaccctgtggactgggaccaagaatacagctactagctgaagcctaaactgtccaggatgagataggtgaaagctaatcagttaacccctggatctaaggaatgtgttttccctgtgcatgagacttctcaaatcccaggtagctgagacaatgtagggcaaataaaatgcaggttggcctatttaatctctaaatgactaattttggaaaactaggcagcttacagcaaaagtatcattcttcttgggttctagtaattcccatgacccagattagtttatttaccagtagagaagcttagagattttatactgttggtggacatagatgaccctaatattcttgtttgctttcaaattatccttgtaaaaataatcaggttcttctttgacccatgatctccttaaggttaggccatgtagaaaagaagagaagcaaatgagataaaataacaggatatgtattgtatctctccctctgtctgtcagtctctctctctctctgcctcatactagagcatttaagagcagtagatttgaaatcagactgcagactttttggtctcaaattctagatatgtgaccttagacagatttctgaatttgtctgagctccagcctctccatttgggatattaatggaatttccctcctagggttattttaaagatcacatgagataattgagggagtggttatccctggctcacagtaagttctcagctcatgttagttgctgttactgttgatggaaatcctagtaataataaaagacaggcaggaaataaaggaatttcagaaatggataaagaaaaggagagataggagacactgtcttagagagctattaaatgtactgaaaggatcctggtatagtagtgtgagctcatgctatattatacaatgcatattaggtaatgcatgtaataattattagacctcgtaaatatttttttggctgttataccttccagattgtccagggagagacgcctagtgcattatatgctgtctgtgtcaggatgagctgctgtggccaaccacgtcccccaactgcccccagcttggcaaaggctctaagacagcagtaggtgacgtgtttaacccaggtacctagtgcagctgagccttgacacacttagaagaaggtggcctcccacagcatccatgtgttcctttgttttccattcaacacatgatacgcaaactgctaggcactggcgtgtggcagtgagggaggctgatgacatacctgtcctcttggagctctgctaagtaggggagacagaaaatgtcaattccatgaatggtggtatatttataattcagtaagtaccagaaaagagaattgaagaattagaattatagtaagggacctgacctagagtgaggtgtccagaaagaccactttgaggaagagtggcaaggaggacagagccaagtcaagagggagaggggctacagagtggcccaggaatggggatcagcattaggaaggaaggaactgaggcccaaagaaaattttagctcagaggtgggagagtacagggactgggtagaggagggccttgagaggtcagctggatcctgtaggtcctttgccaagggttttctttaagaaaatatatttttgttgttactgtaaaatacatataatgtaaactttactaccttgactatttttaagtgtacagttcagtggtggtgtatagtcaccaacaccatccatctccataactaatcttgtaaaaccgaagctctgtatccattaaacaaaagctcccgattcccctttcatctggcccctggcaaccatctttctacttttcaactctgtgaatttgactactttaagtacctcatatcagtagaatcatacaacatttgtctgtctgtgactggcttatgtcacctaacacaatatccccaagattcatccatgtcatagtatatgctagaattcccttcctgtttaaggctgaataatactatattgtttgtacgtaacacattttgcttatctgttcatccatcagtagacatttgggttgcttctgcattttaactattgtgaataatactacaataaaaatgggtgtacaaatacttctttgagatcccattttcaattattttacacatatacccagaagtgaaattgctggatcaatggtaattctgagtctaattttttgaggagctaccatactggatgctaaagagtttcaacttgaaatttagaacagtcagaagcctttggtagattttaaatagggaatggagttgaattagagaagatgagtggaaatagagctagttacaccctcagattttagaatacctctgcgttagattgcaagctatatgcaaagaggtatcttgtctttttttaagacaaatcctttttccttttctctaaacaattttcagtaccaagtgggcctctgttagtggaggttaaagtggacctaagtaatactgagcagtacttaacatctcagcagccttctttacccatctgaaatgtagccatgtgtttccccagaagcagagaacactttgctagttattcacagagctttgacatccttgaatgaaagcagtacagcctggatgaatgcatatatggccataattatctcctttttggactacagaacccattttggctatttttccctcctttttaaaatttctcctcctctctcaatcttacagggctcactctttcattattaggaaccggctctgactgtgccagccagctataaatggaatgccatcatatttaagggtagttcatcattttcatagttttgtcaagtgtgcagccattttccgctgcaagaaagaggaagaaacagtgtttagtccagtatcactcccacaggcataaatgctctttctctcttttgtttttacttcttccaatttagtgatttgtgaagtgaatgagggagaggccctctttttcctattataaccactgatttttcccctacggtgacttcattttgggttgaattttctgaggaagaagaatgcctttttagcgtaggttggacttgccctggtggtgtgggagcaggagagagctggggttgggagtatggactctgcagacttcattcccctcctgactttgcccgtcgttagctgtgtaacctcgagccaattacttaccttctcagtgcttctctttcctcatttgtaaagtggtagtgacagtggtacctgcctgcctcaaagggttctcctgttaggagacactgtgtagaagtacccaccataagcattcaattaattatttcaggcttcctgtctggcttctcactagataaccattcccaggaagatgttaaatgtgtttggtgagccaggcctcagtcagtacacagaacgatgtatctgacaccctcattctggtgccaccattggggcagtcctgcaagctgtgttcatggccctgacgggtgttctcgacagaggcctcctcagcgctgtttggagcagtcctgcctcaccgagtccaggtagtattcaggcaacacagagtctgacttggtagaaaacatgcagtgagtggcagtgaggattccccccgccatcctctgttatatactaaggatagatttaaggctggtgaaaagaaccaaattaacagccctggaaactaaacttgtctggttagccacaaaaaagtgttgttccagcagcttcatttccagctaatcctcttcagccctagagcttggagcttctctgagagggtagtagagagaagggtgatattgactgcagcttagttacccacccacttacctataatactttcagaattggtcatctcaggcctaccccagcacctgcctgtgttctgcagaagatgcattccaaggtcatgatccagcccctagtcctaaggtatttgtgaacaggggagcagctggtgtagaaatgtcccatgggattgaccgtgacgtatctcttagaggaaaaagcttggtatggcctccaatggtcagtggagtgctcagaactgttctttgtagggtggtgggctttgtatggtgggggagaacttgctgggcaggctaggggcatgatgttgttggtgtcatgaaggcagagtgagtttggtggctttgctttggctccatgtgaggctctcagcctgttgtgccagaagtacttatagggaagtgatagaaaataagtactatagccaggtgtagtggcttatgcctgtaattccagcactttgggaggctgaggcaggtggatcacctgaggtcaggagttcgagaggagcctggccaatatgatgaaaccccgtctctgctaaaaatacaaaagttagccaggcatggtggtatgcacctgtaatcccagctactccggaggctgaggtgggagaattgcttgaacccaggaggcggaggttgcagtgagccaagatcacgccattgcactccagcctgcacgacaagagtgaaacttaatctcaaaaacaacaacaacaacaaaaaacgaaagaaagaaaagacgtactattatgatttggggttttctatagattcaaagtatttcatattttttttttacaccaaagaatgaaaagaggagaaatacaaataggtagggtacagaagtctttgaaacataagtggagaagatgcaacctcttgccccaagcagaagcaggccactaggggttcctgggcaggataccaagcgaaactaccaactaacagtgtggctttaaattggcagttgctgctactgctaccactttcatcagcactacctcgacagccaccatgacaagagcagatgtcatttattaagccattatttcatgctaagggatttacttgcagaatcatacttaatcagcctttcaagtttacaagctacaagctacatattattgctcccattttatatgtgaggaaacaggtttagagaggccaggtgacttgcctgctgccatccagctgttaatgtctgtcttattccaactactgtgctatgatctcccttagctttattgtccaaatttgcaaattggagagaatatttgcactttatacctctatagcagtatttctcaaatagtagttcacggcatataagtggctcatgaaaacaatttattggataaaaatagaatcgacaggataagatgggaatagaaatatcagagtgtgtcatacttactattcctgaaaacttttgtttctgatatagtgtgggggtgtgtgcctgtctgtttatgtatgtgtgtattgcttggtaaaatatacttcctaccttgggtcattgtcagaaagtttgagcgctactattatagagttattatataggtcagataaatgtaaaaagttgttgtagagcttttttaaaaagtctaaaatgctctgtaagcctaagttcctgtttaatattggaaggtgaagcaaacaaggaagggatggtggataagtgggatgagctgttgctccacccatccaacccatggtacattgtgaatctgtcactacattgtatccagtggagccagtactcctctttgacatttttcaacataacactctaggcctcaagatgaaacttatctccaaaccctacaataagcttatgtattgttggaatactttaggaccagtctggtgttttaaagtactgcttagcacttatagagctctggctctcatttaaactctaggaaaacagatgtgatccctatgacagcctgggggtctctgccttacaagccctacaagggttggctactgctattcccatcataatgctccctctgccaccatccccaccaccatctttatctggaagtgatttacctccttctgcctctcaaaggacatcagaccaaaacagagtctccatctatttcctcttaaagcaaaggtggcaagaggcccctctgccaaggccattttcatggaacatgctctttcctcattgaatccagttcatgcgggaactgcctgaaacatggggtacctatacctccctacccccaacaactgccctgaagtcatgcccctcgggagatccactgcttctcagtggatgcagccattctgatgatcacagaagaaactggatctctcccaagtgaatatcacatgcaaaactgtttctctgcagcagccaaaggaagcctgtagaattggcagttctttcaaaagacgccacagcagagtagtccacgtggatgtagggatctgaaaagcatgtgtcaaagactccttcactgcaacatgaagtgtacaagaagcttctctgtgtagattttaagtcaagactcaacatgacattctgagccatgtgaggaggaactcagacagctcaatttgacaaaagagcaggttctctgtgttttatagaccttgctaatgaacgagtcccgtggcctctgctggaccggctccgcagtgctctgccagcctgtttcccatgcatctgtaaattcatcgagctataatggatggctggtgcctgcagaggctgacgtctaggcctttctgtccgggatacatagagatctcaagccattaataattcattctggagtaatgaacatagctgtaccaagttgtgagcagtaataatcaagtgatggatcaatttattacttcagtgtgccgaaagataatggtcattaataatgaaaggtgtaactcttcccacccaaaaaaaagtttcctaagacttagatcaatgtgtcttttaagttctaaaataacatggatcattaaaagggaaatgaattatgctgggtaacctcaagcttatttatattcagagttgctaatccagaattaatataccttttttccaaatgcctttgggcactggggcctgcaaatcagagtaattattactcattaattaagtctaagaaatggaacatagctgaagactttgataagggaggttgggatagttgagatacattccccaaaaatcatttgaagtttaatgagtaagtagctgggttgggaataattgttttaggcctactcagaaactctcctcatcttttattgccttagtgaaagctcattgtgcacctcctgtgccaagcagtgtgcttagcactggtgctaccaaataaaataccatacttcctcttctcaggccttggtagggatgacaacactgtgtaataaatgcaggagcaggccaacacttctgccttcactgggtatagaggattggagaaaggtgaaaggaaagtacagaaaggaatgggccatttgagctgagccttgcatattaacagtttgccaagcaaagaaagcagcagaagaacatttcaggcagaggaatgatatggacaaaggcagagaggtgtggaagtggaatgagagtgaaaagtgaattagtatgataattaccacatatcccatgcattctcacatttaatctgtacaacattcacatgaagtaggtatgttattcacccaacttcttcttttttttgaagatgaggaacccaaagcttagaaagattgagtcactctgcccagacacccagagctgggaggtggcacaggcaggcctagtggtgatttgaggaaaggtatgctgttttataagagttcagtctttgtgttaaaaatagtcgggcaggccaggcacagtggctcacgcctataattccagcactttgggaggccaagctgggagaatcacttgagaccaggagttcaagaccagcctaggcaacatagcaagactctgtctctacggaaaaatttaaaaactagccaggtgtggtggcgcatgcctgtagtcctagctactcaggaggctgaggcagaaagctctcttgagcccaggagtgtgagggtgcagtgatctatgatcatgccactgcactccagcctggatgacagagaaaggccttgatcacacaccggggactgttgtggggtggggagaggggggagggatagcattaggagatacacctaatgctaaatgacgagttaatgggtgcagcacaccagcatggcacatgtatacatatgtaacaaacctgcacattgtgcacatgtaccctaaaacttaaaagtataataataaaaaaaaaaaaagaaagaagaaagaaaaacagtggggcccactacaggtttacagtcgtcattatcagaacaattaaacaataaaagcactgctaaacattcacatgtgccatgccattgtgttctccccaggggaggtgtgagagctgagttttaggtggaactgctgatagcagggaggataaagctgaaattagaggttcttgggtcaggaaccctagttaggaggctgttactttagtcagatgtagtgtggagaagcctgacggggaaaaatgatcatcatccaaaccgtgtatttttatattggtctacaatttgaaggtactttcataaaaaaatagcttgttgattcacttgcacacgggacttttgtgacaagaggctaagtttaatgacttagctcttttgggaggggaagtataaggacatagaatttccttgccacacagaggagctgatgttgaaagtagtgatgttaaaagcagcttgtaaatatgcatacttgctgattgactgaggcacagaaccgaagtctctcccccttgccaggtcagaatttgaccatctgcattaactttgtcaaactggaaatgtgatgtaattctgggtagaatggaaaacataagtaaaaccaggagactcagcaagaactaagaaaatgtttgtaaaatattctttatgtggaccagaaacaggccactctccctgctgcaggtgttgcttagcaatcaaaaagcaaatcctctttctaactgggctgtgccacagttaaagtttcataaacctaaccatgctctgcccacctttagaggaggaagttaaactcagccctaaaaaaattatagaaaagtacacatctgctaataaaattggttgatatggtatttcaataaaggctcagtttaaaaaccagcgcttaaggcagtataatctcttttcttccttaaaaaaaaaaaaagtggaccagagaaacagtgagaaacactgcaggcatttatagaattgtgtgaaaaaatactccatataaatagcactaaatgctagggaggtaggtctgtgcaaactgcctatctctacccaatttgtctctagtttcaagttagtaatgaatagcttccttcttgtaacaggtgatttagggaagctcttgatattgtctcaacaaaactgaatggcattaacttttaacttatttgttgccaagtagatgatttatatgtttttatacatggggccagcaagtgaacaatcgagttttatagctaggtcctggtggcctgggtatggagttcagatacatcttttgagtagttgtttattcaaaaatatgcctacgtctttagcaaattactcacagggtcagcgactgttgaccctgtgtgtttgttagactttgagtgtaagtgacaatataaacacagccatatagatgaatatacactagtgcatttttatttctgtttatgccctgtttcacttaatgtgagccatatgtttaatctgatcggcctttaatactttacatctaaagtgctgaatttccttacttggttttaaatatccagatctgcccatttaaaaaattatgtctatttaatgcttatgtttgcaaatgtattaaagccatcaagaggttttacatttgccatggagaaaaatgctaacgattgcagtttaagcagctgccaagtacataaattgtaattaagagggattagcagttacctggacttgcaaaacagggattcagatgttcaaaggttagtaatttggcagatagttgctttggttggttggttgttctaggcaaaatggaaatgataaagcgtgtcatatcctgaaatagcaaaatagcctggatgctgaagatttctgaaatgtggtagattttctgactcctgtggcatctgacgatgacccaagttctggctcctacagatgaggagtctataaataggaagataggaaggatacagggtggttggtatctctgtgtacacgatttgtctcattggtaccttttcttttccttcctcccagtgttgctaacaaccacaagcagaatttgatgacggtggcaaaccttggtgtggtgtttggacccactctgctgaggcctcaggaagaaacagtagcagccatcatggacatcaaatttcagaacattgtcattgagatcctaatagaaaaccacgaaaaggtaatatgtaattgatcacttgcagtgaagaatgtacctggggggaagctgcattggaattgaccttcagagttggctcagatttgcattgctaatcactcttacactgtcatgacgatgaagttgctggtggtggtagtgatggtggtgatgataatgtaaggttggtggtaaaggtgtcaaccgtggtagttacaatgacaacagccatggttatggtggtggcagtggtgggtaaaattgattgagcattatgtgccaggaactgtgttaaatactttatatgtatattgttattttatcctcacaacaattcaatgaaggaagtactcttatgaacctcattttggaaacatgctttgcccatttcttacttgattgttttcttatgaatttatgagttttttaaattttagggatattaaactttcttcatttgtgttgcaaatattttgacctatagtttgtctttcagttttataaatggtgttgtattttttgtaccgtttgtgtgcgcgtgtctttatggtctgtcttttcttttggggaattggggttcctagtctttctttcgaaggttttcctcatcccccaatttgaagaatattaacgcagagctgcccttgtaaaactggggaggggacataaagctgcagtcctctcacccacttcattgctcttatgagcaaatccatatgaagcttctcagaacttgtgcagggttccctaaagcaccatttggcagcaacaaatctggaatctaataaaaaatgctgtttctcttaaataaaaactttgcctagaatggcaaattaatcatgcacaataaatccagaatctgaccatgcctcaccacgtacactgataatgttgtaagccaccactacctcttgtctgactttttacaagagcctcctaatttgtttctttcttgtacccttggcctgacaattctgataccagccaccagaatgagattttttttaatgttaagccagatggtatcagttttctcctaagaattatccagtggcttcccatttcatacatttgcccacatagtctctgtccttttactgttactacctgatctcgtctcctgcatctctcctatagccatcttgtttctgccttgctgtttcttggacaccacaggcacattcctacttcaaggccttcgcagttgctgttcccagtggttggaacactgttcttccataaaaccacatggcatacttctcccttccttcaagtgtactaagtgaagcctacctagatctctctgtttaaaattataatcccaacttcctgcattcccttttccttttattccacttagtctgttttcatatcaaaagacaaaatcacaacaagtttagtttaaagatgttaattgacttttatttgcgattctagaattgggcaacacctcattctgtaaaatagaatgaatattccaggagctgagcagaggaggttggctttatagacagaaaagggctaaagaagagaacaaaaagcagattaattgttttgaagttactttccttgtaaaagttaaagcagaggggacttccttcagtgctgactaaaactggcctgtttggggatttgcctgttatctctcccctcatttattggaaggtcagacaaacaacttatttttggcttgatggcatagaacttcagcagaagtaactgcattttgatttggtctcttgagcctagggcaggagctcagtccaaaccagtggcctcctatcaattttatttaacacataggacttcacaaattatagggcatgtaataaaatttacttactgattagatccattggctttctgacctcttcaagcatgtgtgcttcaggaaagcagggacgttgtgttttgttcctcagtaggcactagtacattggttttgggtgaatgtgacagccagcctccaaaatggctcccagtgatcctgtccaccagtgttcattcccttgtgtagccccctccacctctgaatagagctagcctatgtgatcaatagaatattgccaaagtcatggtatttgacttctgagaacagaacatgtacattactctgggaaggtcatccttcatattcatagggtttgtcgtctttgtgagagcaattggaataagccatcttgactcctttttcactgtagcttcaggcctagcctggtatgaagtaaggagatgctccctcagtcttttttggaagtctgtggtgttcaactcacagcaattctaagcatccgtggctgtgctctggcctctggctttctggagataacactttgtataaactccctgccaatagaacttaactttaaccatcaaatccagagcaattttatgtcctcagaaggatgttgtcggagacttactctttaaaatccacaatgttggccaggcacagtggttcacacccgtaatcccagtgttttgggaggctaaggtgggaggatcatttgaagccaagagtttgaaaccagcctgggcaaaatagcaagacccccatctctacaaaaaataaaaatgaaaaatcagctggatatggtggcacatgcctaaagccctagctatgggaggctgaggtgggaggatcacttgagcccaggagttcaaggttacagtgagctatgattgcaccactgcactccaacctgggtgacagtgagatcctgcatctaaaataaataaataaaatgttttagaacataaaacttcatagtatttaaggtcttagttaatacttaccaaccatttccttagacttggctttaattttctgtaatagaaacacacacacacacacacaaacacacaatgtctaggggtgactcttcttctgtctagtcttagtgtcaaaagttagacaaaatcctgaaaccctatttgaagaaatgctttccagcagcaccttttcatgtgaaacaagtttgcttgaaacaagccctactacagggctaaagtatataccccccatagcgactagcacagtattctctcatgttgttaacatcttatataaggtatttactttgtgcttcggaataatcattaggagggctctaggaataaatggaacatagcactgaaaagaaggtgtggaaacctaggcatctagccattggagccactccattgacggagagacgaagagagccatgagatgttttaattttctattgctatatagcaaatcatctccaaacctagtgacttaaaatagcaattattttattactctcaattctgtgagtcagaaatttgagaagggcttatgtgtgccccttgtggtatcagctgggttggtttgactgggactggagggtccaaggtggcctcactccacacagctgggactttggtactaggtgttgaccagaatgccttgatcctctgccacaagacccccctctttccaggtgctgtcccatcattcaggagtccagccccaagttccaagagggcaaacacagaagcagcaagggctgttaaggcttaggcctggagcaaagtatcatttctgtcacattctgttggccaaagcaagtcacaagtccagccagattcaaggcagggggagctagatgccacctctgggtgggaggagcagtgtgtgcacacaggcgtgggaggattgttgaccgttatctctgcaggggatctatggtacccagcaagtttgcatttagttccctttaggaatgactctgctttcttatcagtggtttgtgctgagcatgggtagcaacccagtgtttttatggagagtgcttttccgcctcctctctgcattgccattttttattcaaccaggagcctcaggcatctggtggtagtgacaatttcagcccttaaatgccctttgtgagccttggtatggagaaccaactcataaatatctaaaattggaaaaacatttttaagattggcattaaagaaaaaggaaagagaagtgggtaattcagtttctttaacctggtaaaacacctctttttcaatagaaggtaagagacctctgtgttctaactagctaaggcatacaatcttttctctctttgcctacctgtctttctgttgttttccaagggttaacattagacattcagctgagggttaatagtgaacatgatctcctttattttgtcactcacacccacacatcctcaagatagtacctgcaagtctagaaacaccctctccccccaacccagagaatccatctatatcttcctcctgggagccatagtgatgtgtttcacacacaacttgtgtttggtcagatagagtgcactaacgacatgcttaccctgtcacaatggtccagaacttctgtcctccacctctctcacggacctgggagggaagcagtgtttggcacaattctgggaaataaatatcctagattaggaggagacagagaggaaaacagctaggagatatgatattatgtttgggggctcatggaaatttttctttttccatgttggtaatacatactgattgtttactcaattaaaattaatgaatcctttaaatgaatacagtccagaaataataatgatgatagtaatagctaacttttacttacagcttattgtttacaagatattgtgctaagcagctttatatccatcattcaattttcacagcaaccctataaaattgatatttttagctctgtttttacaaattataagcctgaagtgcagacactttaagaagcagctgattaggagaggaacaggggttgaacttagtactactctcagaacccaagctattaaaatctactctagttaatctcttttcagtgcagtaagcattttattgaatatctaccattagccaaagataagtaaaataggtccttcatttttcaaggcactcccattttatcaagatagaactaactataatacagtgtgctaaatgacctccagtaagatgaataaagtgttatggcatcactgaggataaataatttaattctactggcattgggctctgacagatcaatggaagttttctaggcagagaaagagtagagataggagggacagccactcagaggagcagcattaatcaagttgtttgtattaaaatggcatggttgtgaaagactgtgggttgttagcaagtagtgggtgatgatgccagagagttggattcagtccatttgctaagggtcctgaaaactataggaaaaggttttgaactgacttctgaaaactgggagctctcagaagtttccaagtggaggctaaaatgattatgtcagcactttagaaagacatccttggaagctgaaccaaatagtactttgattgctgacatcaaaatcacacattaaacaaataacacaatagagttaaccatactgttctaaacttgcagctcagatagtgtcacctttgacctacaggctttgcttggaggttagagagagattcttaatttgtttctttttgccagacttcctaaggggaaatactagctcatagcatcatttcctattagtgactccttaccgtggactctccttgaattatatgagaactaaagagtagatttgatggtgtagctctttttagctacagtcaagtttctgagttgaaagctcagatggcaaagattttggctcttcccacgctatgttaaggtagcagtcagttatgcaaaattaccatttccgtatgaacagaatcttttctccaaactcacaccttatcacactgagtcttaaaacataaagtaggcaaaaacttaaggttatggttaaagcaaccaatatttttatgcttccagctaagattttcaaacaaaatattgaatgctgtcatggtccaagatctcaaagcccagaaattatatttattacaaggttttccctttacttagtgttttaaacgcttacttgctaatgactatgacaattttagatgtttaagaaggacaaccatatcaagaaaacaaactgcttgcttttcatagttttggttcaacatgaaatttcaggctacttagtgtatgtgtgtgtgtgtccccttgctattaaattccaacacataatagtaggattgcacttgttctgtaacaatccatgctgtgtcttgtggctgtggcactcgaaacggtttctgtacatggagcaggatatgtgtgtgttcatgtgttatgtaccacaggcttttgccagcattgcctcttttgatgcctattaatgtttgacaaaataagttataataattccttccctagtccatcagttagctttggaagaggtgggagtgttgatcattgagctgttaattctcagaaatccccaaagatcggtgcccctttttaatgtgttaactttcaacctcagatgtcaaggagaggagctagcaatcatggatgacccccacttaacacctggactaagcactaaatcctaagcaacctcgcattcccaataaaatgctagtgacttacaatgtagttagctcaatttgagttgatttgggccaccaatctgccttgatctgcttttaccaaaatattggtgacattgaaatccattggactagttctggactttgtgcacaaaatgtacattagttaatatagttggtttggcaactgacaggtgtttagaagtcgcattttatttctttgatatttcaaacagttgttgatatgcaaaattaataaaaaggtatgactggatgcttcactatgttgaaatagtcattggtactcttgcctgctcaggaagctaatcttgtcctgtggtcatggcttttgtaatttgttcatcaatttttatttttaaattttttgttgacttcccttccaatggttcttgcttgtactctttttgttcctctccttgttagggttcagaagcaagctagatttacttgggtgttgagctagaatgcttctgccacagggctattttctttttttagtgacaagtgctgtgtaagatactcttcattaatgtgataaggtaggttgtgcatttgaacacatatattccccccaataaatcccagataaaccaataattgtttgaattgtgaagctcctttaatattactcaaataaaggtggagattgttgttgtattttaatctatccatctttgtcagcaaagagaacaggaaatagaatctttctggagatatggaaaatcacagctctccatggattacccaagctgtctatatataccctcagttactaatgtaattggttccttttgagagatttttaatacaactacccaaactactttctaaattgttgatccctctgccaaaatgctgatatcaacaggacataggacttccaactgtccttaaaaaacctctgcagttacagcctctgaatttggcttcttaacagttacaatacataagccctgctaagacttgcctggcttccactgtgaaggtgctgggtttatggcttctctgagagcaccacgcagtcctcggtcccattgtctgtcatgagaaggagtgagctgtgctcaactgttgtaggtctactttcctaatgcgtcaaacaaaccaatcccacattactagggaccctggtacatttgtgtctcgagaaaatgctcagtctcatttctcgtataaacctttctgttttgctttgtaatccccaggcctctgctgttgatttattgtctcagagctactttgcagttgtagactaggagctcttcgtcatgacctaatttccctcccataaaaatcacagcacataataaagagtacaccacacacattacagggagactcctaatccttttaaattgcaggcgcatgtgacagatgggattgaagaaggtctaaaaatgtgtatgtgacatggataagaacagattccacaagtgtcaatgctctgcaatgtcaagatgggccagagggggaatcagtgaaatttaaattttgtagacagtgcaagggaataagaacaggaaattctgtcattgctgtaaacagttaagatcaatgttttgcaaagaacagtaattatatttacacttataaattaaatcctcatgtcctgactgcaaataatccattgttgaatctccagttatttcccttcttgtgtgtctccttttttattgactacagtaatatcttttgaacactgaatgtcaaactgtattaggcgtgtcagtcctcaccacagtcctgggactttttacagataaggtctctgaaggtcagagagttacataatttgcccaaggtcacagcgctagtaagtgactaaaatcagatccgccagactccaaaacttatgtcttcccattttgtcctctgtctctcaaattaatagtagctataaagaccacaagtgcttaagacccagacagtcaagccatctaggtcccagtccagctgcactccttatctatgtgaccttggacaaatcagtgaatctcaaggagtctcagttttctcatctcaagagggcaagaataatagtacctcccttacatggttattgtgagtaaaataatccatgtagataatccatgtaaataactgagcatgataagtgctcaaattctgtttttattgtcatttataccaccaccatctcatgcctactctttgccacatactgcactgagcattttatgtgcattgtcttttcagtagctctgcaaggcaggtattagatccttgcttgcacaagggaaacagactcagaagggttaattatcttgactgagattacatagctagtaggtagcaaagtcaggatttgaaccctactctgtctagctccaaagcctgtttgctttgtacctgtatgatgatcttaagttcctttcctgtatttgatgtgatgatatggcagtgatgtcagcgtcagtgatggtgaggtccgtgtagctgtaggtgttgctgcccactgaatgagaagcagaaccaagatcagcccaggtttgtctgactgcagaggccaaaccatccctgaccactgtgacttgcagcttaaggcgaaacagtagcttggtatttatggatctgctaattccacttacaggaagcttgaaattggggatacttagaagagttacccagagttatatttttgttttacaattttattccccaatagcttccagaaggcttacagtcttccttacttttatctctaagacattcctgactaagtcggaattactttgtgagtttggacagtattaacagggcacttggggcagaaaataaatctcccccttttgtgttaatttggaaagtctctgtgaaatgagtagattgttccagccacatggtagagctccataaatccatggctcataggttatatgagctcctgcttccgtcattcagcagggttgtttgcacagtgattcttctctacagactgaagaaaacttcatttgattctcttgaaatcatcccttccaaaatgaaataggattggaataaccaacaaagttgtgaataattcagattctcattagaatcccaactcgagcctttagcatagaggcaaacccgtggccagacagtcagcaggctttaaacaatttgcatgtgttcaagtgtcagagttaaataaacaacagtcacttggggaatgattttccagagtcattaatgaaagtttgtgtcgtctgccctgacttgatctaatttgcaaaagcaccctgtaccttggaagaatgtgtaatagtaattatgataatcacatgtctggcactggacattttgcagtgtgcttccttgcacattatctcatttgatcctgagaatagccctatcagcggtcttcaggagcctggtcctggctcacaatgagacccagggaactgacccttgggactatggctcttgcccatggcaaaaatctccttgtagagctgattctcttatgcttgaataacttaattattttagaggaaacagctgatgagcagagtgaacttctcccttgtttgttaccatgtctcttcctgctctgctgtatataaatattgtcttggaagcaatttttcacgcatctgtctaaagccatggtccttcctcaccagttactcttttttgtttctccagcatttactacagttctcaggaaatagtaaaagctcacatttttgttgacagttgaaattgaagtccatgttatttttgctcccattgtaattgggtaagggtctcattttcagtaactcattagaaaaaaaagagacaaaatttggaggccagaggcaaagcaggatgagagggaaaataatgagaaccaggcctatcgctaactctgaattcattttcaaatgctcttagctagggattgctgaaggtgctgtaactgaggccagaggcagaaaggtactagaagacactgttaggttgaaacacatccttgtatgtttgggacaccagcttttgtagtgaagattgcctggagattagccaaatgaatggctgctgcagccctgggacttcactcctggtcactctcctgcttagctgtgtggcattgtaagatagtcatccaacttgctatgctgttggcctccagcttagagatgcatcatgggatgcatctgcctagcatagtgcctggtaggtgcaaaactcatacatagtagccatttttaaatgtcaatgataatggtacacagtgaggttgtcaccaggggatggccaaaataaacagtagggagaaagcttcttagaggttgcagtccttgagcttttctttctattatagaggctcagtaagagactagagatgtttatagcactggtaaacttgttttttggggttccagctgctcgggaagttaggagttttttcttgcttttacttggtttccttctcttcttattcccttgccccagttgaactcagctacgtgtagtgattcagtttatcttgttgaaaattttcagtcctctagggaagatatgatactgctgttttcagacagctgtgtttcggagtgagactgatttaaccagctggctggcatcattggagcccgaggacccgccaacccatggagagcagctgtttgggctgaaattctcataattcttatgattttgtttcctacacatcggcttttgagttctgtttttaaatgcacacagaaaaggagagaggaccatgagaaagactgatgtgtctagggccactcatgggtgaaaggtggccctagacacatcagagactgttaggaaggagaaaactcaggagggaggagaccaacttcaaagaataagagatggtaatgagtggatccataaattttgatttttcaatatatagtgggggtgttatgcagccattaagaatcatgtctgaagatttttttaatgaatgaggaaatactgtataatgttagatgaaattatatgatacaaacagaataaagaatataatttcaatgatgaaaagtgtgtgttaacattaactggaataattcatacaaagcatttaacttagtgcctggtgtggcaaggactcagtaaaccatagctacaggagggcagactctctaaccacagaacgtgtttgcctccttcactgttagacccatagtgcctactataaaagagatgcttaaaaggtgtgtgttgattgaatgaatgagcatcagtattattgtatccatttaaaaaggaatctggggtaaaaaaaaaaaaaaaaactgttatcttctgaaattgtatctacaattgtggctactgaacctccctgagccttagttcttcattataaaatgctgaggacattacctgttgctcaggattgctgagaactgagtgagctacatgaaaagtacacagtgtgacgactggtacctaagggagtctgcaataagtggtggctactataatcatggtaagcaccatataagtattagctattataattattaaagtctgccatacttttatctgtagaaataaagatgagagttgtcatgatttctatcattttcttctcattttttagcatgaacttttagaagaataaaagcccctcctccaaaaaaaaagcttataaataaataaaacctaaatgctaacagtggttatctctaggtggtaaaatcgggataattttttgttttcttcttgagacttttctgcatttttcaaattgtccatagtacgtgtgtgggtgtgtgtgtgttacttttatcaagataaacgaggaaaagctcagcatcacagataacacggagctgctgaactagaaaaggatgctgcagctgaggacaattgatgaggattgggaaatggtgccctgccctgggaccctttgtgaaatgttatttaaatacatgtttcacagtttaagaaagttgtgaagtaattgttaagaacttagaaccaatggagaaaaataaaggaatttttgattcattggttctggacaaaggtagtcaaaaaacttcaagtgctgttaacagacagtggcttctattgagcacagctgctttctttttccctggagagaacaataaaaagacgcttagtggaaattgtggcagaagaggttagaaatggaagtgggtggttatcaaactctgggataagcttccaaacaagaatgtttaatgccatttcctagaaaagtttaaaatgaagtcttgaacaactgccagtggtcttctcggatcttttcttgctaattccaagacactgccaagctttccgttgtactgcttcaggcctgttttcttcccagtccacagatgtgagtaaccttgttgtgaaacttcgtttgcagatatttaacaccgtgcccgatatgcctctcaccaatgcccagctgcacctgtctcggaagaagagcagtgactccaagcccccgtcctgcagcgagaggcccctgacgctcttccacaccgttcagtcaacagagaaacgtgagtctttgctgcatagggccagcgtggcattcagggacatcccatgctacctgcacggctcagggtggacacttccagcttttctctgtgtgctactggctttttgtgtccttgaagactgtatcattgtgccctcccaagtgcctttgctgagtaaccctgataggacaggaagcaatattattgagaatgaaagagaagggctgccattgaggattctctttccagatcacctgtggacaaacagctgagtctcttttcctcctgctcctacacaataagagctgagctcaggcactgcttcttaagctccccttttgttagcaattcccatagatccagtgtcctttccttttctcggttgtaatgaaatacccattagtgtgagtcacatgccctactagaatgtgactctgtgagggtgggaccttgtacggcttgatcttttactccacctttcatggtgcctggcatggagtcgacacctaaaaatatttgaaattcattagtgaattaattagggaacaataccttacttgttccaaataccagtgtgttatcaccacaattatatcacatccgtttttcatctcaggatttctgagttctttgcaatgatcaggtactgacccctaaaatatacagtattgtttcagcctttgctctaagagagcctccatttgctcatctgtaaaatagggataataggacccactcataggaagttatgcgaattaaatgaaattatgcatttcagcatctggcataaggcctgggacatggcaagggccaattactgagagcagctactaccattattggttaccgtttaatcacacacagataaccaaggatggttcattcatgcagctgacgtttacacgacacctaccagggactgggaatataagcatgggaccttggctttaaggagttcaaaactgagtaaggaaggtagacaagtgactacaaatgtgagtcagcatcacagctgcttcattagagatatacacattgagagaggtagcagaacacagtggttaaacacactctggccccaggtcgtctgggtgtgattctgcctctgctgctcatcagcagtgagtggcttgggaagttacctaatatctcagggccccattctccttttctgcaaaatagggttgatgctttctatttcatggggttgttctgaggattaaggcccttcaaatgttgccaggagcagagtcagtgctcagtaaatgctgggtggtaatggcacaggtattgccatcatcatcattattataactcgtttctgtgaggtacagtaaagggacagaggcaggacagtgagctactttgccttgaagaggagaggcttcatatctggattggtatctttctttttgtcaccaaaaaggtgcttatttaatccccttgtatttctaaagtagtggccttccttaccataacttctaaaagcaaaccttccccatcccaaaacccttactgcacttcaagatgtcattgaatctcatcatgtggctgtaccttggtatatttagcatcattcgggttgtttcaaatattttgcttttataagtaaagctactattaacatccttgtaactaaatctgctcttttttcatgaacatttctttagataaattcttagaataatttctaggtcaacagatatacaacgtttcaggactttgaccctgtcctgggattggctttccttctaacagtagcctgtgttccttttaaatatctggctggggtcattctcactgtggtctgcacgtggcctgggcccctgcgagtgtaccagggaacacttggaacagaactggcctcactcacacctgctgaatgaatgaggcatcaggctatggggtaatgtgcttctcaggtttccaggacagccacggtcacctaatgttttgtacttatcagtgtacggtgtagattaggagaggctagacagtattggtaaattccctaagcttaaaatagtgctgggtatgtggttagaatgaagcagaagcagctttggaataggctttaaagcattctctgggagctcataagaatgaagatggagatcaggagaaaatcagctagatctttgtccaagattaattttatcacacaaggcagaggatgaaagttaaggatgtgtgaaagcaggtctgtctcagctgcagagcaagctgctctgtccatgtctgcagatggtagacaggggatgcaaaaggagaagacagtgaacaatagggcctttctctaaatgttaggaaatgctccctggaaacatgaccggagcatacagatatgctcagatatttgtagggagcctaactttccctcctttctcagagaataaacattttaactgcaagtctgtgtgttctttaactgcaatttatatgggtgtctgtgtgtatatattggtttgttttagagacccctttttttctgcgaagctagcatactatccaaaccggcatggaaggcaccctgtgggggggcagtgggagagttgactggggaagactgagctaggagctggaaggttctgctgggacctgctccctcccaggttgtaatccagccacccgtcactgtcgggtgagcagatgataatgcactgtgaagttttcacacacttcacctttctctttgtctggtctatggacaaagacagaaaactttatcctagcactttgctgaatttactgtttggcattaaagtacaggtaacgattatgcaaatgtaataatttgtgaaaaaaggtatatatttccatataacagtgatttcagtttgaggcctcctgacacacctagctcagtgcttcccaaatgccagtcatgtacataacccctcattcaccatttgtgccacagccacatagctcatgcactgtgacttatttaatatacttctttaagttaaccttaaagcaactcacttctttccctggcttcatcctgatacataagacctctaagaacacgacttcaatggtctcactgtattattctctaatatatgttaaaataaacatgtaaccattaagatggaaagtggtcatccatatcccaccttagaattattttgtgtcccacttgtggaatgcatatcactgtttggaatccacaaactggcttttaattttgactgacttccatccttcctcttaatttaagtatagaaactcaagttcctttcctccactcaactagaattgggttcagatattgtcagtgggctgtggacacttgccgttcatgtcagtttcctgctgtgccctttcagttcatagtgacacctgtcctggtttgatgcgaccttacctttcttcaggttcttgccacagagcagatacctggttggagggatatgctgtgagggcacacatgcacccataggcacatgcacatgcgcactcccgcatacctctcctctaccttcacacttgccctgcgatcattttcagaacctcatttcttttgataagtctgtccacctgatcccttttgagtccagtcattctcctttttctcttcattgatgcacttgcaagttaatgtttatttggcattccatttgtcagtcctctctccagtccgcagttgaaatgcttagtggggttgaggcttccagagtagctcacttaggtatttccctcaaagagactccaggtgctgttggcagcatacatttttctcccagcctctctgcagtgtccttactctgtgcaaaagttggagcccactgtttgctcttagaggtgaatcttggccttggattgtcatttgcctcttccttcccagagaagaagctcctcaggctcaggcctctgcctttgcacctgcacttcaggctcatggtctgggatattagaatatgctcatagatgtgtgtcttatttgccagaaggggtttttcctacagtgtgagtagaccagttgtgtgcccaggtccctgcctgcgactctctctctttaatctatgggtattagtatagtcttctctaggtggttttgtgttttgttttgttttgttttccttttcctaaacgtaaagctgtggtctattctcagaatgaggagcttgatggtttctcatgctctgtgctgggcagggacttaggtcagttataagacagcaagtcgctcctcatatcataggcaatgtgtgatggaaatggggctaggagtgaaatgggagcagcctctgagatgaaaactttgtggacaagaggaaagggaatgatggggaaatgcaggatttagaaagcatcgtagcaacaaatacaaaccatcaggaaaccactgaatattttagtgaggaaggagctagatatcaaagttatctgtagacagtcaaggaaggttttctgaaaggaagagttttgagaaagatacaaaatgatatgaagggtcccattctggcccaatagataggaacggtggtctgtgatgggagagtctctctgtgagtagcagtgggcagctcttgtctgtagaactgcggagagaactgtagaaaggtgatttagccaaactgaacctggaagacgttttccctagaaattgatttttttcttgtctgtgtttaatatctatgactatataacttaccaggtggtttcttgtgttggacattgtgcaccacaacagcccaactaatctttaaaattatatgacacaggtactgtccctgttttacagtcgaaaggaaataaaatttacattaaatagtgtacgctcagggttacacggcaacaacgtagatttgaaccctgtcattctacctcaaagtgacactgttaaccagtcgttattttgctttcaaattgtgggatggttccccaggagatgcattcttttagggttagctgttgtgacctagtccgcgaactcttccttatctccaagggaaaatgtttccagttccacttaagaacctggagttcaaagtttcattcagctgggcatctgccggtaaaatgctgaggggctggggtggaagtacaaatggatacatttggtaaagaactttcaggccaaactaaatttgaacctcatctaataataacaataaaaataaaaataattatagctctacttatgtgcctactaacctcattatctcgtgtcatccccacaattgatgataatcctgtgaggtaggttcttatatccacattttacagacaagtaaactgaggtcaagaggttaagcagttacactgtcagcaaatggcagagaagggatttgtacccaggtagtcttctagtcttccttccctatactttgttatctccaaaagggtacctttgtcagttcttgagctacagaagtgaaaaccttgctagcctgagttacagaagcaatgaaaaccatctgttccagcttccagggctacatgggggcagttgaaccatattgaatgggtacctcaatgtgcgtcctggcaggctgcagccacgtgacagtctcccctccaaatctagcaccaactacacagagagcgatatgtgttgaatggtagctttaatatgctcggccaagccactcacgctcatttgcgatcaccttcgaacagatggaacgaggtttttcaactgtgctcccagatgaatggcagcaaaggagattactctttaatctccaagtttccacacagatacaccatccagcagagactgtactggtacatctaggtgaaaggtactgacacacacgctgtgctttttctggacgactgtagaagggggagccagaaggattgaagggagccagcaacaaggtcttgtaccttatagatttcttccaagggtttgcaaagtgacacttaggatttattctgtcccaaatttttagcatttataccaagatgttgaaatgcgtttcttggaacagtggttcatagacttgagtgtgcatttgaatcttgtagggagcttgttaaaaatacagatgcttggtctcctacccaggatattctgagtcaggaggtcttggctggggctcaagcatctatatttttaaagcaccctagtgatactgatgctaactcaatttagagaagtactggcttgggaaggtggggacagtcagggtggcttgtcttctgtcattagcagaacatctctttgaatcactgttggagtttggagcaccctggcatggtggttgaaagtggaggctctgcagtcagactgagatgttttaatgtcatctctatcacctaccactctgagacctggagtacgttactttccttttctgagcctccattttctcatctgtaaaatctatcactaataatagcttccttggagggtaattgccatgattaagtgagccagtatatataaagtacttgacattgggcctagaccatagtaagcacctaataaatgttagctacaattatgatgattatcatcacgctgtagttgtatcttacaactgactaaggaaatatccttccctttggagcctgcagattccaaaagagaggcccatatgtgagggaaatgcagattccccccggcccctgagacagcctgtctgaggcttgagtgcaaaaacatcagcagcctaggacacattgtacagtgtcggtgggggtgggggtgggggcaggagtggattcttgggccttgttttacatggatcatgttaactagctgctgagattatagctctgaataatttttttagttccgttaattcatcctagaccctctcccagacaggcccagtgagaggttgagaattcagcttatatatttctcatgtgtgtcttccttgttgaaaaatgactgggaattcatactattcaaaggcttacgtaatgcctttctctgagcagtcaaagctgtagcatgtgccctttctcaggttgcctttgcagatcccgggtgccctgggcacacctgtttgctttggcagatgacatgtttattcacatggattcctgttgtcacacgggctgcagaaggtgtgtaatgtgtttcttgggttaactatgtgtaattactacacgtgactgaaaaccacgttgataatgtggctattaaaaaatgatgctgtggaaagctggtggcaggaaaaaagttccagctagacccattaaatgaaaacaagccattctaggcgcatacttttggcactatcaccaagtgaacaaagcagataccattaagtatgatgtgagtctgcttcgttaaaaaagtacatgtctgtgtgtgtgtatatgtatatattcctctgtgtagcagatcgattggacatttacacaccaaaatgaatacaactggagcgtggcccatacgggatatctgtgtgcagatgcaaatgcttttctagactttctaaattggagagaaatgcatatttcttatatattcacttggttttaagttattaaaaacaaaactccctaattgcacctttcatgtactatctcaaacccattttgctgtgagtcatggtataaaagtaggtgtgtagtttccttctaatgagcaagaatataagccgtctgtacgtggactccctcagatcccagtcaactgtaagttaacgggaaaccaacttttcctaaaagcaagtctcacatagaaaagagggctgtcttgtgagtaatacagtgtccatttaactctgatcattcaaccccctagtcaacattcatcagaggcccattcctcctttgcggtttctgaaatggtgttttagggccagtcttcctcattgtgcctccacgtctctttcctgtggatcagtgcaatcccaggccacccacagtgacttccccattctctcatgaaattcagttttattggcattttttccctttgcaaagaaaagggttattacaggtgctgcagggagtcagtctgtccacacagaaccaaaatcagaagtcgttttgctgaagataatctgtcaaaggttttaatatcatctttcatgtactatgatcaaaacaacagattgactctacttttcacttttttttttttttttttttttgagacagtcttgctctgtcgcctaggctgtggagtgcagtggcacgatcttggctcactgcaaccttcgcctcccgggttcaagtgattctcccgccttagcctcctgagtagctgggactgcatgcgcccgccaccacgcccagctaaattttgtacttttagtagagatggggtttcaccatactggccaggctgctagtctcgaactcctgaccttgtgatccacctgcctcggcctcccaaagtgctgggattacaagcatgagccactgcgcccggcctacttttcaactcaatgtatagagtctatcatcacccaaactcctttttaagatttttttaaaaaaaaaacattgtccaaactgtttttatatacccaaacatattacgcagactgctttttaagtttgtttttatcatagggactgaggctgctgggtcagcctgaaatgagaccacctcagattttagtgtggcttggcatgtcactattatcaggaacaagagctacagggggtaaaaattgcttcagaaagtctgattccaagcttcccatgtacttgggtatttcccagagatggtaaactcagaaattgctgtgcactcatcactttttattgcaaaattcattaagctgctgtgctattatcatcccatcttgtcaagatgatacattacagacttcattgcaaaactttaacaagtaggagaaagtacacctctctcctgaccacagcacaggaaagcctctgggtattttgtgtttgccttcctattttttttaatataaatctccttgtctttgtaaaacttcgctctgtctggtaactcccttttctccttgtttgatcatgtggagagtctgttccctccttttggctctatgaggcatcctgagatgctgttaaagaacagtcctcttgcctcttctttttgccctctactcttaggcaccatggaaagttgggatattagcctgtattctgacagagtcccatgcatggggggaaacctcccgcaaatgtttcgtatttaccctccagctctgtgtattcagtgagccagacctgttcgggcctgccaagacgtgtgaatttggcttggctctgtgagtgctttcctggcctcgcctctgggttctgtgataaacagagctcctgcctcccctgtgtgatggggttgccattagagtgggtcggagtcacttggtaaatatggaaagtgaagtcgcttagctcccagatttccatggcaacccccagaacaagtacaatatcaccaaaattattctgcggctttccttttttagttgcagtgatttggttgcatactcatgtttttccgttcctgatttgtacaaaaaacaaaaactctgcccactgtcatcagtactttggtttcaaggacatttatggtccctgtctaaagcacctgaaaaattcagtcacgcaaaactacccctttctgttccagcagcataaatttttgactgtgtattattcccttatatttaatatttatcttataaccattcacggagccttagtgtcagtgacccatgggctaggcaccaggaatggatggctaatggtgacctcacctgccacgttaatggatgctgtatggccagacagcatgtccctgccctcgggtagtttgcatccttaaggaccaagttcacatgcagtttgtcactccttatagaacatatgtttgtgaaagcactgccaatgcatgcttaccattatttggggatttattttatcatgttcttgttgctgaggtcttgttttctgtgattgatacaaagacagattcctgttgacaaacatgtttgaggcgggcaagcattctcactgacttcaaccagtttaggcatactcctgagttgtgggcattctttcctttttgacatggtcctctgtgatcttgttgacttgactcataactagctgtttttcttttgaagcccactagcctataatttttttccttcagcaacataattgccatcagtccttcttataccttctatgaggataccagagctggattgaatcatcagtgactcagggaagtctagctatgttatttgaaggatttgcttaattttaatttttattttttaaagtgtcttctaggctgcctgttcttgtgcgcttctgtcaggagcagtactcatttgcctagctgatgaaaaactttcctgtttcgagtgacattacgggatcattttttctttattattattattattttttaaaggaggcagagtcttgctctgtcacctaggctggagtgctttggcaccatcatacctcaccacagccttgaactcccaggctgaagcagttctcctgcctcagcctcccaagtacatgggaccacaggtgtgtaccaccaggcctggctaatttttaactttttttgtagagatgggggtctcactgtgtttaccaggttgatctcaaactcttggcctcaagtgatcctcccaccttggcctctgaaggcgatgggattacaggcatgaaccactatgcttggctcattttctccttatttcctaattgactccaaatgctgtaaaatttgtcttggtatagtttgctataaccactaaaacatttgattggctgttggtcttattctctactctttccctggaataatcctcacctgcctacttaccgtcagtaaagattgtcagccttttggctttgatcttctacctagatgttctcagtctcattatgtgttgtctacagatgatgagacctttcttctacaaaactgtagtcgttttatagtcagggaatgccaggtttctgggttttcttgtcatatggcccagcaagggataccaataaagagtcagcctttcaagatgcatatttggccctcttggctgtaaaactatgaagccttatgatacatttttataccctcctttactaatggatagtaagggagaaaaataatctcctggtaacattttagaaagacgaatatacttttagcaagatattgtttttagtttgtagaatgataatcctctcctggaaaagtaaatataatcacaggagaaatgtgagcaatagttatgctcttctgttccctaagaattctgagaattatgccatgcaaacttagccctttaagcttctcaaactaaagttaatacaactgtttttcttcctgtcctgtgaagcagtaaatgtctccagttgaagcccagggaaccgtcctcactctctctctttatatggtagcctccagttcctcatggtctttcgggcatctttgtatgcgtgtcttgtgaaaaggaaaattttactgatactgattcatactgataaatggcacatccaatctctcaatgatccccttattatgtaatcttagcgttgtttttctttctggtaggaagttcccatttacaggccctgttagtcctcctacatcttggctcagtgtaactcttttggtttctctttgttgtcgtttctgttcaaaaacgaagctcttaaaatatgaacagttttaaatctcaggcatcaattcaatctactttttccaaatctactttgagtacagtagtcaggagctagcctcacagggtttttctctctcctgtggggctttatctagggcattaaggatttgctaagatatcaggggtattggggtgaatgtgtatgtatttaacgtgaggcttactctagaatcactttgtaagcatactttatttttacatacatgactcgtgcaaagggaaaagtatttttatgacacatcaccctcttaattgcctaaagagacctgagttcaaatattggcctttaaattatcataccagtgactctagactgtactctgagggatatattgtaacatacccctgactcgctgcaaaaaggtccaggattagcctagatatgatgtttaagtgaattaattttcagaaatatcagttgattttaatatggtatatctgtaataaataggggacaagaatcacattccacatctataatattttgctacagtaatggtggatgctggtaccatttagctaaattatctccaaaatttgtgttttccatttatgattccaagtttttaaagatgggaagaacataaagttctgttctttgagcagtgttctgaagtttacaagatacattcctgcctatgatcccacttgatcctcatgacagttccacaagctgtgaaaggcagttcttgttctccccattttatagattgttaaccaggaatccaagatcaagtagaaattgcctgaggccacatagccagtcagggcttgaagagaactcaggttttctgtctcttggcttggcagtattctccaagcatgaatatgactgctgggactatggactcaagtgttttgttgttgtttataggcaaaccattctgcagcccattacagagcgatttatcaaagaattcacttgaagtcaaacaccaagtacatggagctagaggcaacacagaaagatgtgtctgagaaagggtcaggaatttagactggtggagtcgtaaggacattggtggctaaatagtagatcttctctggtgaggctctatggaattggaggtgggacatggcctgatcaattagagcaatattagaggcaggagttttagaataaaaggtgagtgtcacagaagccaaggggatctgggtgaatgtgaggggtctgtggaggcttttctctactctggcaatctgccagtcaaaagaagatgcaatttatggtgccatagtagggccactcttagaaaaaatcctggcttatattaaaggggagatatatcctgttatgacgaggaaaggggtttgctttaaaatttcgagtcacctgttcccccttgactcttcctttcccacttttaattcttaaccttttctatgttgtttcttaagcttccctgggatcagagatcttgatccagtcttattctttatacatttttgtgcatgtagcaatagactgtccctatgcaataatattaatatgggacttgtggcttttcccccccagaggaacaaaggaacagcatcatcaactccagtttggaatctgtctcatcaaatccaaacagcatccttaattccagcagcagcttacagcccaacatgaactccagtgacccagacctggctgtggtcaaacccacccggcccaactcactgtaagtatgatgtccagctgcctaccccacaagggctttggtcagccattccacctagaatttgctgtctggctccatctgactttggaccattatcccctgaacattatttaaacctcctccctaaactgggagctcagctggcttgttgtgggtttttaaagcatcatcatctcagagggagtcgttattcttaacatactgcttcttagccttggtgatttttgatttactgtcctgctgagatggctttggtgatagctattgcctgtgctggctgctaggcatgaaaagcaatttctgtaagttttacaaacgtccagggactgtagcagctctgtggccgagtttgtttcactcatctatgttgtctcggtttccctccccactgactatgttggaaatgttcaatgccaactccatgtccacttccataaggaagagcccccaggagccctttgtgtcttcacatcctcaaaccttagcatgactatgacttcttgacagagactatgaaagagaagaaccctttttgctttatttttcagcattgagcacccatagtcaggacaattagtttgggggctggttgtctagccctccacagaaactaggtctactctgctaggatcagaaagttctccctcatggtttcaaccccacattgcttcacatgcttccttagactaccccataaatcttgtcaactagcgcctttgcagaaagaatgtgaggccatgaccggaacagttggactctcaggctacagttatgtaagactcaggaaaaacagatgattttcccattctctaagtgaaaatacattgaggttcagccacagactgtcttcagggcagttgtttcacgtggggagacgctagcatggcggtgagatgctaggatgtcggtaaccttttcctgctcctccacatgccatagtttcatgacagcaccctgccattcaattgctgtgagatatttacaaatctgcaaaatgagtctgataatttctgccttagaagacactaagggctattaaatgcttgggaggagagatgactccaaatggacttaagaggtacataataaaaatgtgactatactgtaggatgaaatctgaaactgagaatataagatctttttagttgttggcagctttaaatcatactgatgttcaggaagtttaattatttgcctgttgagtggtaaatcacatgttccttcaccaagaagtggaccagtgcctcaggacctcaaaataattgaatttgtttggcttatgggcagtgagtctcttccggttctccatggctgggcttgcctagggagcctccctgccttgaggtttgaccttctcaggttctcctatacccactttcctagactttagggagattctattttctttacttgtttttttcttcagttggtttaattttctgtacctagcagttgctgaagtgattccttgctctgtatgagcaaggttgaatttctagcccaagttgcttaacatcccctgattttagccagccgctaccaactagtggtctgtaattttcttttcagtggctggtaactgtgggcccctgagtcactgctgagtacagtgtgtacaaagaggttgcttaagcagctaagtggaaaaggggaggtgtgtcttttaaacaggtcctgaggagaaggcttgggattttttgttttttaggtgtctagatacgatttattttcataacatcctgggaatcgctctgcccacttcacaccacccagagggactgttgcctgcctggtacagatctggggggctttcctggggaagggagggtgataacaggaacggttctaattgtctctggaggagaattagaaaaagaagtgtgggtgtgcctccaacaagaccactgtccttccaagctgagtgagtcgctgattgatacctttgggtcttgaggtcagggaaggttgttcctgaggtagaagcagtaccagcatcagccctgataccagcgtctgccatggccctgagtgagagccatgtcaaagtcccccataagctctgcaggcaggctcgcagccacttctcaaaccccaggcagtgaggtgattttcctgggatcctgtctccctgatattttctgcctgggatttgctggtgtggatcatgcatggctgttaggcagtcctaacaaatggacccacagtactttccctgagcaatttgattctgagaaatctgtcggcacacagacgtgccacggtaacaatcacctgagacgacttgggtctcagcctcaggtgtggacccttttgttccctccatcgttgttgagttggaagtgtccagagatcctccagtgggaacacttaatgatgcagatgaaaataaagaacaaaggtgggctgggaggattaccattaacttgactattaattatgcatgaggtagggaaccagtcaccaggaagctatctgttctttttatttcactcctttatttcactatttttcataatgactgggatatcattatgaccagagagaaatcatagtgaaagaaacatgtttgttactcataatacagtggtacctctgataatacattttgctgtattactaatctttcctaattctccaaggacatcagggccctcttatttacatgaatgtaatgctaaatcaggcatcaaaattagagaggccatcattctacctgtgccagggcaaggctgctgggtttaaatctttggcaggtcctcagcttgactcctgaagtagccatctctcctgaagaacaaaggacaattggtaagtcaggaccaaagtccagctagtctgaaattgttagcaactgtggctgaacctattttatgcccagacccatgcatgccaagctacctggggtaaaccggaataagagggttcctgtcttccccaagagttcacagtctagctaagaaagaaaggcagtggcatatggcagtgctaatggggacttacaagtcataatgtgttcagagttcaaccactgtcaactgaatatgtggtgagtgcacacactaggtcgaagtagtggaaaaggtcgggtagatggagtgtgaggtgggcattaggaaaaacttaggtggatggatgaagagcattccaggtaagaaggatgaaggaggcagagattatccaggatggataaatgcattctgcagacatgtgtattaggggaggagggagctggaattcctctggtaccactaccaccaaaaaaagacttgaacaaacctttaaaatcaggagtcttcacataaaattcagatttcatgctggaacaactggacatccatatacacaaaaatgaatctagatacagacattatacctttcacagaaattgattccaaatggaccataggtctaaatgtaaaatgcaaaactgtaaaacctctagaagataacataggagaaaacctaggtggccttgggtataattatgactttttagatacaacgttaaaagtataatctgtgagataaaaacttaagttggactgtgtttaaactaaaaacttctgctctgtgaaagacactcaagagaatgaaaagacaagccacacactaggagaaaatatttgcaaaacacatatctgataaaggaccagtatccaaaatatacagagaactcttaaaattcaataataagtaaacaaagaacccaattaaaatatgagcaaaaaatatgaacagatacctcatcaaaaaggacatacaggtgtcaagtaagcatataaaaatatgattcacgtcttatgtcttcagggaaatacaaataaaaacaacagtgagataccactacacacctctgagaatggccaaaattccagaacactgacaacatcaaatgctggctaggatgtggagcagtgggaactctcactcattactggtgggaatacaaagtgatacagccatttttagaagacagtttggtggtttttcacaaaaccaaacatattctaagcatacaatccagcaatcatgttctttggtatttacccaaatgagttgaaatttatgtctacacaaaaacctgcacatggattttgttagaagctttatttataattgccaaaacttgggaagcaaccaagatgtctatcagtatgtgaaaatggataaacaaactatggtgcacgcagacaatgctatattattcaatgattttaaaaagtgaactctccagccatgaaaagacatggaggaacttttaatgcatattgctgagtaaaagaagtcagtctggcggggtgcagtggctcacacctgtaatcccagcactttgggaggccaaggcaggcagatcgcttgaggtcaggagtttgagaccagcctggacaacatggtgaaaccccatctctactaaaaatgcaaaaaaattagctgggcatgatggtgtgagcctgtagtcccaggctcaggaggctgaggcaggagaatgggttgaacctgggaggcagaggttgcagtgagctgagatcgtgccaccgcactccagcctgggctaccgagcaagactccatctcaaaaaaaagaaatcaatctgagaagactacagtatgatatgataccaactatatggctttctggaacatgcaaaattatggaatcaataagaagatcagtgattgccagggattctggggagaggaagagggatgaatatttggagcacagggtatttttttcgcggtgagactattctgtatgatgctggaatgggatatacacaagacattatgcatttgtcaaaacccatagaacacaaagactgaatgctaatgtaaactatgacctttaataataatgaaccaatataaatattggttcatgagttgtaaccagtgtatcgcgttaatgcaagatgttaataattaaggaaactcagaatgtagaaatagagagggtatgtgtaaaactttcatgcaatttttctgtaaacccaaaactgctctaaaaaatagagtctattaacacatctttttaaatccagatttccagcttcttttgaagtgtcagaagagttggttacactaaacctatgtgaaacttgggagcagatgatactctctggtctctataatctcacagctggcctgcttcacttttatacctaatgcctgtaggcccatagtagattaaaaatggccatagaatctttgcaacccctcccattaagagctggagcccttgaatctaggctgacctttaccctttgacttattttggccaatagaatgtggaggaagtgacatcatgtgccttcccaggcccaggccacaatgcctcacagctttctctctcattctcttggaacccagtcaccatgtaaagaagcctgttgtagcctccttaaagatgacggattactggagagagaagcccagctatctctctcagcgcagctcagcattgggaccaccagtcagttgaatgcagccacctgggttagtcaggcaagaccagccaaagcttcccagacaacctatagattcatgataaatatcacattgtgattattggaacccagtgagtttagggtggtttaatatgcagtgatagtaaactgacacaagtcctgtgagtttgtgaccgcggagtcatgggcagctgtcttgggatggggctgagctgtctgcatgaatagaaaggtatggaagagtctcactatagtatagtgcagcatggagactagcctctcggttttcagaatcttcttggaaagaaaacaacttgtaactgagattctaagaaatttgggaaacaaaatttatggctaatggctgaggcaaacaagaaaggtggctcaaatattggaatggaaagcaggaaaccctaggttttagttctggcatcgacattgcctggctgatgatactggtctctggacctgagcatgcccactaccaccatcttccactgtctctggtggaagaaatggggctgatccacctccaaggatgagggtcgttcaatgggtgcttactgagggctgcagaaataaatcattctctccttccacagtgaccagtggggcatcatgccaactcctttctgggagagagtgattttaaaggaggaagtaaacaaatgctgagaaagaagtcagggaatgccccaccagggacataacatgctgcagtaatttccccaaattagaaactactaggtaaatgccttctttagaccacaaagattgaaagattgaaagaaagctaggagggctgggatgattactgcaatgatggaacccaaccttggagttctctctgcctaagtggtccccacccctaaaaaataactaactgctcagtagcctcataaataaaactaatttttctcgtccttctgtcttaacacacacgctcatgcatttccaagttatttctggtgacctaaaagacgcacgcatgccaaacgcctgcagattctgccagagtcaaccttcttctcctgtcttagtggccagagaacagtccctggaattcaaaggataaacaaggcctgcgtccagacagagttgtttctctgaaacattgctggcttcttctgagtttgattcagctgttctctgatgaaattcagggaaaacttgccttcagagatatctctcaaattttactaatcttccactttagttggtcaacattcattccacaaatgtcaattgaactcctactgtgggcctggtggtggtctgagtgctgaagatacagtgatttaaaaatattaaaaaaaaaaaaagagtttctgctttcatggattttatattctagtggagacaggagataaatcagtgtttaacacagtatgtcacacagtatattgagaagtcccagggagaaaactaatggagaaccaaggagatagggatttggaggagaaggaggcaagtgactttagctctctgtacctcagttttctcatctgtaaaatagtgtgatcataacctcctcaaataggtggcatgaaaattaagatcatcttttacttacgtattttagtactgtgtatggcaattaatagtattattttggagggctccccccacaaactgtccttactttttctccagtccctcagccatggtatgtatttttcctgtgcagagaaatgtcccaggctgtcccactcaccttcccccaccagcctcctaccttgaatctgagactggagctataactcagtccaggctttaagtgatcagtgaagaggaggaaggaacttctgctgtagaggcaggtgctacccctccttaaagcaagaccagctagggtagacacgccacaccctgttcctgaaagatttggaaacctctgaatcccacagggtacctgataattgtgtgcatagctgttatttattgagaccaaatgaatggcaaaatgaataatatgcattagacaagtgataattcatagcatttttttttttaaaaagcaattttaccatccccatgctattttatgccaaagggttacacccaaacaggctgctatgcttttactagaattgtctctatttgtcatcctttggaatgtggggctttgaaagaggaagttttcctctgtggctggatcaactttttgtggagaaggatctttccttttagatggagaattctgtttctcacccacctccaagcagaaaagatctcttcagaccgatttgcctgaaaagttggtgacattccccacctttggaaataacctgaacgcctcattgttttcaaaaggattcatttgcccctccttgctccccacagtgcccttggggattccagcttacttactcgttcattgttgtttcttggacatgccagataccctccctctgtcacctcaggctcctgggctgtggaggccacagctctgccctgtaactaggccacgtttccttgacattttcagtttgttactggtgtgacccattttctgagtggcttcatgtccacttttctctttccctaagcaagatctcactcatcaatcgggagcccagctgggcttcccttggttgagggtggaaattcctgccttcatccaatttttatgagataaatgtgttggttattagtggtggttcttcttttttaaaatataaaaattgcttgagacagacctcacacttggtgacccagcagggtttctttcccaagcaccagggacccatcggtggcacttggatctctacagcctgtcagcagagggggtatgggaggaggtaagggcagagcgccgtttgaatgcctagccacatccctgttttccagcagagtggaaatcacaaatggaaaaatgttttcctttacacatattgttctgttcttttctcctgtacaagctaaaatcatataaagggtctgtattttttctataaacttataaatcttgctaaataacctaaaacagtttccaaaaattgccctgacatacacagtacatgcttaaagctttggagtttaattaaaggtatgaatgactgaatttcattttgaatttagctgccctcaaatgccttatgacactgtattttatttgtgtaagtgttaggcattttaaatctcaaatttttggtagaatatttgggaaggaaataggcttaagatttcgcatggctttttcaacattgttatgcctgtgagggaactttgaaggaaatctaaagtgttatttttcttatttaggattagattagaattgtttctacctctgtgtatttaatctgagggatcttattcgtagattcagattctaaattgggtaaattaaaagtacattagagttcaagtactgcttttgaaaccttttttagtcaatctggaaagcagatgcttacttagctaggaaagcattcctagttggaaacagccttagaatcttgtttttaactccttctctgcattagggatctggaaagccaggcaggatcaaccataggcttcatttggtctctgttacactggtcttccaaggcagacccttagctctgtgcactggttctcagagtgtggtcctgggaccagcatcattggtgttacctgggagcctgttagatctacagaatctcaggcctcaccctagacctataggatcagcatattctggaaggagggccctgcaatctgtgttttaccaaaccctgcagatgattctgatacatgctcaagtctgagagccatagtgcatagtgatctagtgcgttaagctcatggacttccaccagaataaaatcaggacttacctcagtgtaaagctctcagggccaagcctgtgtcatcaccagcaccctatgattgtctgtgcagtgatgacagtactggggcttaactgagctctgcccgtggcctttgggatcagtcacagcttatatagctgaggagggatgggtttgcttttcacaggaacctattagctcaccagggctgcactttccatctccccccaaaagcccagtcagctgcttcgcaaatgcgtgcctgttggttacaaatcaagacagggtgggtgcatcaattaatcaagccagtagatgtttttattgtttatctattgtgtgtgtaacatgaaaagatcaagatgctggtattgacagaaaaatagctctcaggctatgtgatactgaaggtgatggatgagcatcggcgtggacagattagagatgtctaaatcagcatttcccaaactggtacaggaagggaagggggcaagagctgctttggactaagttcaacacattctttctttttttttttttttttttctcgagacagagtctcactctgtcatccaggctggaggtcagtggtgtaatcttagcccactgcaacctccacatcctgggttcaagcaattctcccacctcagcctcccaagtagctgggactacaggtgcacacctccacatccagctaatttttatatgttttggcagagacagcgtttcaccatgttggccaggctggtcttgaactcctgacctcaagtgatccacctgcctcagcctcccaaaatgctgggactacaggcgtgagccaccatgcctggccagttcaacaaattattgactagagaacttctgagcctttaatatgtccatcttgaaggggcatctcttacgctacatttcctaaatacgttgaccatagtacatgatttctacagcacttctcttaagcctcttgaaagagcattccatggtttgggaaatgctattctaaatcgacattctacttttgaggggggaaaatgtatttctcataatggatggcattactatggtagagatcctttcagagaacagagattttgtttatatataagtgtatggccacaaatagctttccgaagactgaaatgggttatagggttatatcacgtgaaaagcattggtaagctttagaatctggggcagggcaaagcctgtgtggcctgattgtggatctaccagggtcaagcctcagctctgccatttcctaactgtgtaaacttgggaaagttatttgctatctctaagctaaacctcttcagtgaaatggtagcaataataataatacctactttcaaggttataagataatgccttcctaacacttagtaaatggcctcgttcagagtatcaatcaataaaaccaatcaataaaaattggtttctactattatttttattccttcttcttatttgctctcagactgctccccctaccaatgaacaaacccctagtgttgatttctttccgtggtggcagtggatggacactcaatgtttacttttgtttatttgtttgatcctgatgtaacataaagcaacccagattaaaaacattgatataattttaaaaaggaattaaaataccccaaattaaattaactataaataataaaatacactgaaatcaatagaagtgctcctcttccaagacaggcatcgaactgtttacacaaagagcgttggtcaaagccccctaccctattgttcctccgttgggtggagccaactggaaactacgctgattaggctagaaactaattgcaatctcaactctccactggggaagaatttagcctcaggaattcctctccagcctaggactctgtgttgatttgactgtcattatggcaaaagggaaaagagcttctgaaaaaaaaattatctggaaatgtagcatcttagtcattcactgcatttgcactatcaaattctcttctaatatctatcaccttccttcacaaggaagcagtggagttctcactaagacattgctttaatgttccttctaatattctttatgaagtaaaggcagctggtgatggggctattccctggctgttgtcaaaaatactcagaaaagggataaaatagctgcattacagactaccctattacctcttgttgccctatacaggagaagccttgtcttcagggaaaaccaagatgttattgtccacaaacaaacaaacaaacaaaggcaaaggtgttcattcaaggttgatgtattaggatcctaagaagaaactttggtgcattcaaaataacataactcaaggagggtttattaacaaaagagttggtgccgaggaatcacaagagatagtagagtaagccagggctagcagctgctgcccagtcaccacccttagctgagagaacatgagaggaaagtggtacaggaacccagaaggatatatgagttggtgtcttgacaggagcagtgaccttcagtcaagggacacagccagacctttcagaaatggaataaatgccttggccgtctccttccccctgctagtctaaagagctccccattggtgaacccaacaggaagcccgaggttgcaaaagccctgttgaagaaatccatgctggttagatcccagagaagagatcagggtaaagattgtgtctggagaggcaaattaatgatgtccaaagagtggaaacagcaggaatagctatcaataaaggacggcctaaataaatagtagagttgagtactatccagtacaacagaggaattaggtagttctgtatgtgctggtctagagctgccttcaaaggcacattaaagggggaaaaaatggtgcaggacagtgtgcagctgtgactctcagtccagatggcacatcagcaccacatggggagcctaaaataaaaattaccaacatctaggccccttccctggagcctcagagttaactgatctgatgtagggtctgagtggtggtatgtttctgaagcctcccaagtgattttgatatgcatctagatttgaaaaccatcagtgtacattatatgatactattttatataagaatccagggatatagacacaggatttatagacacacatgggtgggtgtaatatctgtaatatttctgggaagatacaggggaatgaatctgtgtggttttccctgaaggaggcagatgggatggtgatctgtggcggaaggaacactgccttttcattttaacactaccctcttgtggtatgggattttttttttttttacatgtgtgtgcattgattgtttagcttcaaaaactcagaaatacatttgcttggttttgaaatgaccattcattcattctcttaaagctttggaacatgtcttagtgagaaaagatttttctttttttttttttttttgagacggagtctcgctctgtcacccaggctggagtgcagtggtgcaatctcggctcactgcaagctctgcctcctgggttcacaccattctcctgcctcagcctcctgaatagctgggactacaggtgcccgccaccacaccttgctaattttttttatttttagtagagatggagtttcaccgtgttagccaggatggtctcaatctcctgacctcacgatccacctgcctcagcctcccaaagtgctgggattacaggcatgagccaccatgcctggccaagatttttctttttaaccttaaacttttttgtgttacctcaatagctaggagtctaaatgagatgctatttgacagaagagtaaggcctttaccaagaagttgttgcttttggtggtttttttttctttctttttttttctttttagacagggtctcactctgtttcccaggctgagttcagtggtgcaatcacagctcactgcagcctcaacctcttaggctcaagcgatccttccaccttagctcctgagtagctggatagtcccaggcatgtgccaccatacccagctaattttttattttttgtagagatggggtcttgctatgtcgcccaggctagtcccctggatgcaagagatcctcccacctcggcatcccaaagtgctgggattacaggtgtgagtcattgtgcctggcctggtatattttaagtgaaaatgaaattaaggccattggtcattgaatcattccatcaatggccaaatggctccctctctccaggctggcctcgcccagggctctgtgtcagtgtagtaagtggtaactgttggcacagcagaagaaatcacatatggagttaactgagctctcgctcaggaagctgagtagaaccagttagaccccagcctctgggctatttcagatttttttttttttttttttttttgagatggagtctcttaccttgttgctcaggctggagtgcagtggagcgatctcaattcactgcaacctccacctcctagtttcaagtgattctcatgcctcagcctcatgagtagctgggattacaggcacgcagcaccacacctggctaactgttgtatttttagcagagacggggttttaccgtgttggccagactggtttcaaactcctgacctcaggtgatccacccgtcttggcctcccaaagtgcagggattacaggcatgagccactgcacccggcctcagatttcctattaaaattagggagccctaacttaagaaaccagaaagtcaatgttaacattgagcagctactcatgaactcctcctccagcccccaaccaacattgtgaaatgtaagtagttcaattatgttgagctatatatagttctttcacctgatcttcatctgtcattctccatctgctatctacccaatttcctttgaaagctccattttaaagcagaatatataatggaaaaaccttaactcctgacctttatggagatatactagagttactcaataataattagcagttgccctggtaagctcagacttactgcttaaatcacccatatttgtcaccatcccctgcctgtaggacaataagatcacctgctttgtgctaatgaaaattgggacattttagtaattttataatccttttcagcttctgttgtaagggtagaagtgatattgtttgtgattatgctaaaaagaggctttttgttttgttttgtagttaccaaagcagtgagatagaaatcattctgggtttcgagcaaattggaaagccctgttcagtctattttgtttaccactgtattgaaaaccttcaaaaacttaagtaggtgaaacttgcagactagaatttaaggatgatggccctgagatagaaaaggagaatgaaattggcaagtctgtcatcatatcagacgtcacagacaaagatgagtaaagcccactaactccagcactttgacttgcgcaatgctgctggaaggttggtaaatccaaagctgaagcacaagagagatttcttcaaatgaatgtgttggcttctgctctgtctcgggggaagcctgcatcccctctgtagcatccatatactgtgccttacagcatagacctcatggtagcatggtaggagctccatataactctgcttcttctggaggagaaacagacactctactcccaaacacacacatacacacacacacacacacacacacacacgcaatcccctttcccatttttcccttgatcctttgcgtggaagtagaattagaggaaatatgtccttagtcatcccatgacagcacttaaaatgttcagttgtcacagtgaaaataaactggcaagaaatcagaaatcaagaagtggagtcatgggaatcctggacatgctaatccaatagagacaagatctacatgttagtgatggccatggccaaggtaatcatcccagacagcagtcagactctgcattatcccaagagaagactacaaacatttcatttcatatgaggaaataaacacccaccaattgcccttactgcccgctttccccttcagcctcagtggaacgcaaacttattttcatctaatgtttccctttggagtatggcaccaactgttgaatatttgctactgtagcctaactgctctctggagcactcactaatatcagcatccagaatcggccagctctgacagacagtcccttcccagtcagtgagcaaacacgcattgaatgcttagtgtttaagacactattccagggtacagtggcccacacctgtaatctcagcacttcagaaagatcacttgagcccaggaatttaagaccagcctggacaacatgacataccatctctattaaaaaaaaaaagttagctgagtgtggtggtatgcgcctgtggtcccatctacttgggaggctgaggggaggattgtttgagttcaaaaggtcaaggctgccatgagctgtgattgcaccactgcactccagcctgggtgacacagtaagacctcatcttaaaaagaaaaagaaaaagacactattcgaggcactgtgaaaaagactaaaatatactctccttgctgctgctcagatgagggagatcagatctacgtatgtgggggagcattgctgccaatgcaagatacattttaagtggtaagtgagcagttgggtcatttactcaaaaatatttatggttgaatgaaggatcttggcaattgtaggcagggtttccaataatttccctagttcgttttctagatctgccttgaagtgtataatttcctcatctgccttggtcttattgctgtgagttgggtagaaggagttctaggtttgtttgtttgtttgtttgtttgtttgtttttttaagatggagtcttgctctgttgcccaggctcgagtgcaatggtgcgatcttggctcactgcaacctttgcctcctgggttcaagcgactcttctgcctcagcctcccaagtagctgggattacaggggtgcaccaccacacccagctaatttttgtattttcagtagagacggggtttcaccatgttggccaggctggtctcgaactcctgacctctggtgatccatccacctcggtctcccaaagtgctgggattacaggcatgagccaccatgcctggccagagttctagttttatgatccatcttttttctcttgttctccaggaggcttcctacctctcagaccctaccaagctatgtccccaattttttgtttttttcccactgagacctctatggctctaatgttttagatttcaagaaaacttaaaatttggactataagaatgacatagaaaggaaaaaatatcacaaagaatgaaaagctgcaatttgatcatttgcatgtgttgcatttttgaagtcctccccaccccattgcaacaagagactttatctttaggttgtatttgttcttttttttttttttctcccaaacatctagcagtttactaatatttgtagtgggcaaaaatttgtaacaatttcttatataatgcagtatatcaaatatcctattaaaataaaatttagttcatatcttgaaggattattttctgaccttatatggaaaaggaaagttttgagaatgagtagttctttaaaccctgaatcaatgtaaccaggaaaaaataagtgaagagagactgtgccttgccatgggtcaggggaagttttactatcaaattttcatgcaatacccaaatctctgtataggtatgagggctctcttttctgtttctttgtctataaggaaattctaaattaaatttcctcttccttacaagccagttattaagttattaagttctgcctttaatttcagcttgaatcaattaggttagatgcccacaagcaagtgccctggttcatcatttcaaagaatgagactctttttgctgtatttttctttgcatccatggctgatttttctacccttctactagcagctcttcttccgcctccaggagtttattcttttcactagtatgccaactccagtggcattacaaagggagggttaataaaacctgtgttgagttggtattttgactatagctagctctgaattggagcatagagagcgctgttagccataacctgagtgttcctgatgaaactcagagccagctttctgccttagtcatcatttttggttcactttgtgtaagcaagttcccagtgtaacccactggccttggcacacctcaggaagaattaggtctctatgtacaaaaatgttcgacagaaacctaagaccctcatctagaatctgaatatataatcagtgtgtcgggcctcaaaagagaagagcaatgtgatttcatgtagaaccctatttgtatgctgccacagccctatgctttgctttacttcggattcatatagaaatccaagaatttgtagtaagtaagagaaagaaaacaccatctctgctcagctgagctggcccgtgtgccgaactaggaagatggctcttttcctctggagaggatatgatcttttcaaggttgctttttacacatcaccatggggctggcctggttgcatgctgaagctgtgaaacctgagtgtgtatctgtgcaaagctggggtcgaatcagggcccctaggggccctgcactggttttgttgagtggaacatacaggttggggtttttggaggctgggtggggaagagggaggagagatgagggtgttgtcagtgagggaggaactttggggaacagaaatatctaaaaggaagtttaatggactttcttgtacacggtgcataatgtgaatcctcgtccatgtcacctcatgcgggcttcggtaagaaccactccctcattcttcagtcttccacagtattaagagcttgggttctgggggcagatttactgaagagttcacatcccaactttattagttgttttacaatgatcacttcctttttaaaatttattttagattcaggaagtacatgtgtaggtttgttacgtgggtatattgtgtgatgttatgaggactgggcttctaatgtacccatcacccaataatgaacgttgtacccaatgggtaattctttagtcatcaccccaccgaccctccccacttttggaatccccagtgtctgtcatttctatctttatgtgcatgatgtgtattatttattccctgcttataagtgaaaacatgtagtgtttgattttctatttctgagtacgacgaacagttccttgccctctataagcctcatctgttaaatggaaacagtagtagtatctacctcctagggttgttaggatgaaatgaaatagttcatgtagagcactttgcatggcttctggctcataatcagggctcagtaaaagttacctgccgtaattatggtcatcgttgctcttttaacaggcactggggatttggaatgtgtttggagggttgtactgaggtgcagagtcctgcttcgtgatgggcacaaggtgagaagggaggctgccctctgggttccagtcatatctcaattaaagaataacacacgcccttcccctaactcatctagaacaaccccatgtacgtagctggcagtgaacacaaaagctctctgagtagccggaagagcccacaatttcatcagctctctagacctgttggacaccctcagatcagggtgactgagggagtgtgggcaggaagcccagaccaggaatccaggagaggctgcttagggctttggggtccaggcagagcaggaactataaggaggtggagccacttggaggaaggcgaggaccagaatggagtggagtggctcttttggctccacatgaccaccatttagctacttggtgtgttggcctctctacatccagttgctgcttctcagtgctcccctctggcttattctttcccaccattctgtgcctgggctttactctccctcacagcttctgcttccttttagctttggattgccatgacccctgacagccccagtgctttcatagcctcattctccttagaatttcacctgctgctttgctaaattctctgccatccagccctgagggaaagcatctatggactggagaccttgaggcaggggattctacagtttaatcatctgtagccacagtgaactgggttaccaacctttcagcaggaactgaaggtagagcacgttcgaagactgccaagtccaggacataccttttgcagacaattacaacaaacttggctccttggctttctgccatccagtattttgggagtaacagtcataccacaaaaggtggttacattcacagaatagaaagttaataattgctgatgaggcaaagtccagaagaactttttctgaagtcataaaagctgtaataatacaaaggtctggataaagaactagctacccttcaaatccagcagcagcttctttggtcacaactgtataacagcacaagacagtattgatttttataattttctcacctcaagtaaattgcatttgatatattctgtctttgaaggtagaaaaatgtgtgccgtgttttagaaaggtttcctttggttcacctggcacggtggcccatgcttgtaatgtcagcatgttcggaggccaaggtgggtggatcacttgaggtcaagagtttgagaccagcctggccagcattgttgaaacctcatctctactttaaaaaaaaaaaaaaaaaaaaaaaaattagctgggcctgatggcatgcgcctgtaatcccagctactcgggaggctgagacatgagaatcacttgaacccgggggggaagaggttacagtgagctgagatcacaccactgcactccagcctgcatgacagagcaagactccatctcaaaaaaaaaaaaaaaaaaaaaaaaaaaaaaaaaaaagaaatccattgtttgtaataagaataggggcgctcaaatgattacatttcatttgtttgtagagttgttcatcaatgatgtagattgtgtatcacaattccttaagacctagagatggtaatagtatgggggcaagcgcatgactaagccaggccaaccataatattttcatggatttttttgttttgttttaactggtgctgggttaagaatttgtcttgcctaccagaatatccagcagccgtgttctccatcacatatagaaagttcagctgcagccattccaatgtgcaaagagaaactgacaagagatagtggaagcattttttgagcttttttttaactctctctgccattcaacagatttttctgaatgtcttcaatatgtaaacacattaaagatgagttacaggggatcgtgcccttcacgatgagaaataacagaaacataaagtacttgtattgaatggtctaggtgctacaggataaagtgctgctggaattcctaggcaagagagatgactttgaactgggatgatcaaggaaggctttgtgatcaaattggcacttgaacatgcatcttgaggataggttggatttagacagcaaacagtgggaaaaggctcagaggcaagatcatacagggcacatgtggggagctgctcatagttaactttgaacatatgcttctcatctgtaatattacaattgttttgttttcttgtgtcaatatgctttttacctcttcagacactaaagctggggaagcctagtaatgttgtcttcccattccagaattccatgctagctggctcctgatgcaacatcttttgtcaatttatttcatgtaattgacttgcctgagacgttccctattttcatcacagctttgcttcatagtcaaatagacctcaccatctggaactctttttttttttttttttttttttttttttttgctcaaattttcttccacaaagggcctgttttggtttctgagtgtcacacaagatcttacgacattctgcatcatcctctttgctttgagttttataatgttaaaaagccaacaaaataggttcaaaaataagctgtattcctcttctgtgttgcaacccaagactaagcacatcagacaaattctgacaccttcagcttttagcaaaggctgtttggttgccttggagttaggctatatctctaggagattagctctaggctctgagagggtaaagcaactcagaaacaatcaggatagaccagattcatggtgggattaataaggagaggatatagatagtgatcacgtagacttacagaaaatgcctgcttatttttactccttacacagagttgttttgtttagccttcacttactatgctaaacctgctaaagtacatgtggtatttattttcatttggatgggtagcatcccttctctttctcaaactgtaagtgaactatggaaactgcatcccagacattcagtggtgatagtctgacacattgtcacagagcaccatgcactactaaagtgactgttggggcctttgcttttgcaatgtttgcatttctctcaatccagggcctctctgggctctaacaggagctattcctgtcttcctcacatgtttctgaaaactgaacactggtgtaaatttccctaatgtgacatcttttacatgtacagacagttctattcaagaccctgtatgtcagcttgagcagatttacccatcagtgttcttggttgcaagtaacagaaaacctagcccaaataagttaggctaaaatggaacttactggttttccattgtgcaggaacatttgtattcaggcatggctgggtccaggggcacaggtgttgccatcagaacccagctcttgccagctctcatttcagctttcctctttgctgactctccttagataagctctttccttttgattgcagggtggttaccaccagctggacttaccttcttaaaaagcccaagcccagcagaaaagaaagagagagcctctttttctcagcagtttgaaatacaggctgagcctaatttctgttggtccacattgagtcccatccccatcccttaaccaatctttgtggccaggggtataagtgagcctctgtggggctgggcctgaatcacctgttcacccttgactgggtgggaggggagaacaacacccaaggcacacggactctgcggatggagaaggggtggtcctcagagaagagacagccacagatgtcactacactggacctttcttatggggacttcgtgaaggatttggtgactttacactccaggatccaaatttgtactgctttctttcccctcaatagtgttttatatgatctctgaaaatatccccttttttcagtccaaaggcttcttgcataatttattttattcctagttgactgactgcctcctttaagaaaaacgtattttatagttttttaaaaatgaagaaaatgttatcttcctacttagccctggacacagttgattcatttaaaaaacaaatttctgggaaaaggctttcattatcagtgcccattacaggttattagagaacaaatggcaaacaccggtgtgctggggctggcctccattcattttaatgacagtgttgtggagagtgcatcttagaatgtgactaagcagaaggaaaagaatctgaaaaggactggccccttgtcttctgtgagagccatgaacatgcaaaaacagtggctcagcagctctgagagctcctcagacacaggccactgggtggtggcatcttttggtggcctgccagaaacagtggggcagccagcatccacctcacgagctttgcaaaagtctccaacttgttgtgacattgtccaaaacctatgagtttggataagaactgtttcttctgccaggaatcacattgagcggctggaaaattccacctcagtttgatcttccagtgcctggttcatatcctgagaacaaattttgttctcaaaggttgaaatgaagtctccatgagctatggtgatgataatggtggtaatgacaatgataattcacattaaggaagccccagtgtcccaggcattttacatgtgtgtacttatttaatcaacataatgccggaggtactgttgtactccacattttgcacatgaggcatagagagattacctaacttacctgagggtagaggtgggatttgaacccaggtggtcaggttctagtactgccccacccacaaccactatgcttagttgcttctgcgggcaatggttgggtattggcaagctacagaagctgggtgtgttgggaaagagactgaagcagcccagtcatgtttcttctttttcttgccctccattctctggtatcgttcaagtatcagatgctgggggagtttggggagacaacaagagcatgggagaataggaagcagagaatgagtacctaaaaacagaggtcagcgggccagagtttaagagaaaaagagaggggaaaaaagagcaggaaatccttgaaaggagctataataaaggacagagaatataaaggataaaaatggattccaaggaggaaaaagaatgggaggaatgtttattgaccatctgctgttgccaggcactagcctagggcttttccatatgttatctaatcttagaacccagttagatgaacaaccactatcaatattcccattttacagatggggaaactgggtttcagggggataaagtgacttccccaaggtcacagaaagcagcagtttgagctgaggcctgtgtgacccccagccaacaagtcatccatcgtcttgagggctagtccctcattcctggccatggtttgtagccctagatgagagccgcacttgagatcttgagatttgacagatacttggagatcatactccaaggaatatggccattcctttgctgggaggcagttgctgtgtacttgcatcacaaggaggagaggggaggggagaggaataaagttttatgggacacctccttacttcccaagtttcaaacttttatcaagccaactctttaaactttaaatatgttgccagaggtgctgtcacttccttaagcattccataactctccaatctcaggtaagctatttttttcccatacttgtgagatttcctcctacatttgcccatttctgccattaaaaacaaaactaaaaactttccctcaaaagctgaccatctgcttgtcactacgctttcttccaaattgaagaggtggtagcaggatgtttgcaagcccagtatttatctctggcgtaggcacaatcccagcatctactgattacatttcccatttactgttaggtttgcgatttgggatttgaacttcctctgcatttttttttgtttccttccttttatttcttagaatccaggtctaattgtccccttaagggttagactggtttcaatagatttattaagtgatgactttacagtgtgggtgttatgtccatctcaaaatctgtgcaggcaaccatcacatacatgcttgtcccctattgccagctaaaactgaggcagcattttcaagaatgccaagcctttactaagtgcaggcatttgtttgttatttcaagtctttgtatgctgacaaattctgtacatgcatgcgtgtgtttagagcacagttgggtgacatgtgccaggtatctggtggcaactgtcctctgagcatggttgataaccaaataaaatccaggaatgtgaggcttgttactctttaaaaaaaaaaatacatgtacagttgagtaaaatgagaataaaaaataagattaacaaaggctgagagaggaagagagtaattcatcataaaactgtcctgagccacctagcagccacgacaaagaagggaaaaaatataatgggatgtatagttcaattgtctgttcaaaaaaagcatgccagttcatcaagagctacaagttataatattaatttgtcatgtgaatctctatattaatgattttgaatagctcaatagataatatcttccaaagcagtttcatgcaaaaaataaatgaggccctctatatagggctgttactcccattggttttgattaaatacagagtctgatattaagctgaagtattgaaaggttgtttttactatggtgcaacaaggagaacaacctggagaaagcatgtttgctggtgatcggcctggtaacagaatgataggtggaaggcaggatccctcttagaggatcccagttatcttggccatgcttttgataggagctacatgacatgtattctaaattgaggtctgtgggaatataaatacccgaagggcagatacccatgttgttggttgaaagaagatgccagaggcatagatcatgttttattgaggctgactggaattcttgtctccatagggttcatgcgagttcagcaagcagttaccatgtctacggcatgccaggatactgttgggaaggtagtattccgtgtacgtgagacctgcacccaggtttctttaaggtagcctggcagtgctgtgacagagacagactcaggatgcagtgggacccaggggagggacactgagcctcaccctctgggctgcatcttggtaagtgagtaaaagttacccatgggaagatgggggacattgcaagcaaatggaactgtgcaagcacaaacaaggagaaaataaatatggagtgccctcgaactctttggcctcaactgatcctcccacctcggcctcccaaagcactaggattacgagcatgagccactgcacccggctcatgctgcatgcctgagaagtaacaaaccattctgcagggtgtgcaggagccacgagggcctagagggagtggagtcaggagagcggaaaatcaccacaggccagaattttcaagagacgtatttttaggcaggtccaagatgtttctccaaaaacgaagtggctttgcattgttttattagtaagagtcaacatttccgaattcaggcacttcgcttcgcaatttacataggcattgtttttcttaatcctcacagtcacttctgacaggtgggtattgttttcccatttttgccggtagcagcctcagaaaggttaagtaacttgcccaaagtccacaaaatctaactgcagagacttccccacctcaccatttgggagcttttttgtccaaagactatgaatgtcctaaatcagagcccaagtagaattggagttctgagtcatgctgtgtggaagggagaggtgaccttgacctagactgcaccctaggcttccctatacctaaaaaatttaccctgaagatgatttttctttggtgaaggctgttagacattgaggctggtctgcccacaaagatgaatttggttttggcaaaactaagtagctcctcttcccaagattcagttgctgtttgagggcagcatcaaaacagagaagtgttgtatcttcctgtgtgtaaagcaggaagggtgacatctgtttcttccaatagcctctccatgttgtttagaaatcagtatttcttaaaaggaggatggcagcaggtagaacaaaatgtcaatattcattcagtgcctcttctgttttatccagctcagagattctgtcccatgcaaaataaaagataggtaacaatctattgttcagtgttaaggatccggttgggtatgttgttgtacatctccacaatggcatgctacatagccactaagaaagaacgaggaggcaacttttcgtgtaatgatggagcaatctccaggagatactgttaaggaaaacagtcaggattcagaacaatgtgaataactggtggtcatttgtttttaaagggaaggggagtgtgaaatcacacacacacatccacccacaccagcttgcaagttcatttagtatctctggagaaaatatgagaaactcatactaatggttacttctggagagggaaggaagagttatttttcctgtctacccttttatactgatacccttttatactgtctggaaattttatcaactgatataatagccattccaagcaatagattaatgtaaaaattaaagagagaaaatgccccatcccctaaacaagttgaaacatattcatataatttatttgtagatatatacctctatcccatggttgtgaattagccgtcatatgagtattttaaatttgtagtctataagcaggcaactttttagcaatatgggattacataggatcataggtaattggaaccctcagccaaatacttgctgatacactacctctgagtttctaaacaagtgagcaagaaagtcctgtattgaacttctaagcctcatacctgtcagggactgataagtacacatgggcaggttctttgatatgtttccaagtccattatcagagataaggaagcttaagtgtaaatctgtgatttaactacatttcaaatttgatgtggagctacaggaaggatgccagagagaacctgtgtgctccgaatacatctgttgctctagctctttaaaagactttcttttccccacataaaaggagcccaaatgttctctctgctatataaggctatttaactgacctaagggctaactcttactttttggtgcttcacagatgactaagtggtggtattattttaaccagtaaaaattcagaaatctagggtcaggcttgcagctggcagaacttgtaaacagttaatgattgaaaggactaatcagcatcttgaaaggcagctcatgagaagcataagcaaaatgcttaggggtgcctgcagatagaggactgtggcactctgtggtgacagtgaaggaaaatgtgtttgatgtcatcttgtcacagagaaaggctatctgtcagacctcaacttagcatgagtttttcttttgtaagtatgtaagatattttcagaaatgttttagaaaaaagattgttttttaaaccaaattttcagtgtctactcgaaaaaaatggtacacttttttttttaatgaagaatgttggataccaaaatgtaagagatttctaataaacagcccttctcagttggtacagacttcaacacctggtctagaagttttatactattgggcatatgtggggtgtgggaattattgtttgtttagtatttttgcaaaagcaggcttgggtttctttctgattcttatttaggtttgagagagaactgccataagaaggtttttgtttttagccaattttgactttttcccttaatttttaaatttcctcatctgaaatatggcacaataggccaggcacagtggctcacgcctgtaatcccagcactttgggagggtgaggcaggtggatcaactgaggtcaggagttcgagaccagcctggcaaacatggtgaaaccccttctctactaaaaatacaaaaattagccgggcgtggtggtgtgcccctgtaatcccagctactcaggaggccgaggcatgggaatcacttgaacccaggaggtggaggtttcagtgagctgagatggcaccactgcactccagcctgggtgacagagtgagactgtgtctcaaataagtaaataaataaataaataaatgaaatatgacacgtgacaatgaaacagaattgtctttatgagatttatgtcttctcttagccagagattagccaagcatttgttccttaaaaatgaaaagtcatgatgcctgtgtagtgagccatctgctgctcagcagactgcataagagacttgccagccacttctgcttttatatttatgaactgacgttcacttcttagatggtaggaattaatccagtgggactctactttgaaagtaagtttcttatgggaatttacctgcaggcttggcaggcgaaccctttgggcagaatagtgactcccaagcaccatggcatgtttgttttcgagagtttttgtgtccctcctctggttcttcttcctgggagcaccacctccatgctcatatgcattgacatagaagtcctttcaccactgaatgtaaagagccagcctaaaaatgagaaattaatttaccttcgccccagggtagcttagagacagcttttaaattttgatgttaaaaagcacttggaaagacagttcattttggagcctgcggaaggaattactttagttaagggcttaacgtaaacctaagtagcagaccattaggcagaggtctacatttggcattgaaacttaaatttcaatactataatgaaaatttccaccataaaagagactcgggtgtctgattttcatcgttatgcaattttcagctcataatctcagaatccgtaaatgcctttaggatctaatttgcaaagagaattacgtattgcaaggagccatgtaaagtatataactagttctgtggaaagcaaagctgtgagtgacatctaattaggctacaatatcaatgtgctttggctctggcactcatctgtcattactttgaacaagccatttgacctttatattatatgtagggaccatacctcttcatttgcctgttagttctgttgccctggtataaatttaattgcgcctttctgcttcaatgtgctggtttgggtgataagttatatgatcactcactatatacaatctagaataaatgataacacttcatcatattagtttcccaagtgtctttttcactaagttgatcatctgtggaccaaggaccatctagttggcctctcagaatagtgtttggcttttgtttgctacatagtgcttgtcaaatgaaggaatcagcttctcaggctgcatcacgagcctgtaggatttggatccgtgaaatgtatgtgagatcaccaagcataatgctccccagtgaaaacaggactcatcgaatgccaagacgctcagtcatggttgattaccagaccacagaaaacctggcagagctggcacgtcagtagcagacacgtacatgtatttgatatgcatgctcacccatagctgccttggagacaaggtgctgtcggcagaccagaagttgggaaaaatttctgataggcttaggatctggctggcactgctgtcaggaataacaataatactacaaaatatatttatagtgcttttcagttttcagagccacttgaaacagtttgcagagtgtttcatttgattttggcactaacccaaatcatagcacttggcatactgtactatagttgcccattttcttctctgattcctgctctaagctgtaacgtaggtcaggcccacacctgtttcttgttcactattgtttccccagcacttgagggtgctctttccaggtgtgtgataaatacggatggaaagcatgatgagtgcagggcaactactatctcctacattttctaaatgagggacactgaggctcagagggcataagtggcctgttcaagtctgtgtggcagtccttttttttttttttttttttttttttttttgagacagcatctcactctgtcacctgggctggagtgcagtggtgtaatctctgttcactacaacctccgcttcccaggctcaaatgattctcctgcctcagcctcccaagtagctgggattataggtgcatgccaccatgcccggctaatttttgtattttcagtagagatgggatttcactatgttggccaggctggtctcaaactcctgacctcaagtgatctgcccacctcagcctcccaaagtgctgagattacaggcgtgagccaccgtgcccagcctgtgtggcagtcttaacctgtaagctcctgttcaagcctggacctttggattcaaagttcagtgctctttctgttgaatcagtacccagaagaaggagcattgtgttcattgtatgagggtgacaactttgcaagaaacatagaaagatgggagactgcagttccttccacatgggatttgcttcccctacctacacttgctaacatctgctgtttcttttaggatccactgagtcctcctccagggagccttccctgctgccctgccccttgactggcttaggtgccactattcagcgctactacaatagctggtgctcatttctgtcgttgtacttaacaacagctgctgctgcccatgggggctcccttggtgccagacactgagctgagagcttcacatttcctcacgattgccccaggagggaggctgttcatacttcgtttttcaagtgggaaactgaggttcaggaaagtcatctaacttgtacaaggtcacccagcttgtaagtggttgacctagaaatcatctgactctaggctgctgagcccaccacaccccacttaactatatgatttttttttttttccaaggagtctcactctatcacccagggtggagtgcagtgatgcaatctgggctcactgcaacttccgcctcccgggttcaagcgattctcctgcttcagcctcccaagtagctgggattacaggcacctgccaccacacctggctaatttttatatttttagtagagacccggtttcaccatgttggccaggctgctcttgaactcctgaccttagcgatccacctgcctcagcctcccaaagtgttgggattacaggcgtgagccaccgcgcccagccatttatcatgtatcatgataaatacatgattatcagacattaatataccagctttcccccactggactgcacactcctcaagggctggcatgagggcttattcctcttcagcatctagtacctttcctggcaccaaggcagcacttactaaatacttgttgggtgtacgagcaagagaggcagcgaagagagctgtgggagcccaagtgaaaacagggactgcatcaacttcttggaccagcctgggatctcctgggttgcgttgctttttgtgactgactttctgctctgctggctgtgatcactgctcctgcacattgcccttgctgctcagaacagacactgtgagctatgcctgtaggcttttggccctggggcatcttccccacacctggggcttggctccctgggagagaaggagagttcttagctgcaagccactgggtggccactccagaagacatctggaaggaggactctccagagggtttcttgggccttttcttgtctgaagtaatttgctcccttttatttcccatttaaaaaatctggagttatttccaatgtttggtaattccacacttcatttgttattgtggggaaagtcctgtgctgaatttttttcatccctactcttaaaactaaatataggaatgcctcatgtcagcctgcattttgtccccactcaacccactgacactgcctctcaccaaggttaccatgacctccctgtcaaacctcatgacccctttcacgccttgttttacttgatttctggcaacaatggtcattgtcaagagccctgttggtttaaaaccctcaatttgcttttgtctttggtggcaccacactcttgaagttttctggacatctctctgtctcaaaggagcctcctttgaaggctcctttccccttaagagttcttatttcagagagtcaggttttaaattctctctcttttttttgttttgttttgagatggagttgcactctgttgcccaggctggagtgcagtggtgcgatcttggctcactgcaacctccgcctcctgggttcaagcgattcccctgcctcagcctcccaaggggctgggactacaggtgcacaccaccacacccagctaatttttgtatttttagtagagacggggtttcaccatgttggccaggatggtctcgatctcttgacctcgtgatctgcccacctcagcctcccaaagtgctgggattacaggcataagccaccttaaattctcttcttaactccagttgatcttgtccctttctgtagttccatttatcagcaacatatctgtgttggtgcattttgtcactgctataaagaaatacctgagactgggtgctttataaaggaaagaggtttaattgacttacagttccgcatggctggggaggcctcaggaaacttacaatcatggcagaacgagaagagacatgtcttatatggcggcaggctagagaagtgttaggagcgaagagggaagagtcccttataaaaccatcagatctcatgagaactcactatcacggagcattcacccccatgatccagtctcctcccaccagtctctccctagacatgtgggaattacaattcaagatgagatttagatgaggacgcagccaaaccatatcaatgccaaaaaccatatcccagatctcctacctgttctttaggcccatctacccaaatgtctgccaagccagttgactgttacacatgaatggttccccttcctcccctgcacccacacctgtgtgtctccctgtttccatgaattccatctggtgcatggaaacctggccagcttcctttactcatcactgacttctcaacaatgatcaagacctgttgattctgttctcacagcagcctaccagtcaccatccccactgccaccacctcagcccaagccttggccatctggccttcctgaccctttttactggctcattctctactctgaaacctgtgggattgttctaccatgcaagcttgaacacagcactctcctgcataagagtctttgatggccccatggatactatatactccttaatccttttattaactgggaggcctgggtgacctactctggcttgccattgcagcgtctgtttacactctttactttgaccttactgtacttgttgcacttctgcaaccttgccctgtttcctctcatctctggggaacactgtgttcttaaacatcacttccttcagaaagcctttcctgcttccccctccttacaccttcctcctccatgctccctaaacttgatgggagaactctcgcgtgttagggaagcatcatccccagtggggcacttatcagtgtgttgtcatcacctggttatttgtctcattctctgtgggccatacctgtcttcccagttgtatctcctcagtgccaagcacagtggctggaacagagtgacaaacatttatttatacgtgacatgaatgagtaaacaaatgaattacaccggaatagatttctggacaattcattttgcaaaaagaggaactttagctccgcactttggagatgccagtgtctttgagatgttaaggactttttgttttgtttttgttttttaattctttaactatgttacaggtttagcaatgcctccgattcaggaatttgtttaaaaccccccagtggcttagagctgcacatagaataaaatctaaactgtttctcatggtctacatggtcagccattgtttacctgacttaactaacctctccgacttcccctgacacggctgcctccctggcttgtacgctcctgtgcttattcttgtccccgtacaaagcacatccattctcgctgtgaggccttagcagcacctgctcctgctgcctcagaaggttcttccctgatccttacatgctatagcctgccctgacccttctgtccccacacccatcactgtctaccacatcactctgtgttatttccctaatagtagtaagagttgacaactcttactactcttactactgttaactcatctcagctactattctggaggaacacaaagcactcggctttggtgctaacccactgggagttggccttatcttgaacagttgcaaaactcatccacagttcatcatctgctgaagagtggcttgcagatgatgaactgggaaactccataggtttccctctgaaatgttcttgcccggtatttcactcgtttgtctctcctcatgacactaagctccatgagagtaaggcctgtcctgtcttgtgtatcacaggattctcagcacttaggacaagacctggctctgatgcttcctaaatatttgttaagtgaatccgttttagtttaaaaaaacaataaaacttggtttgttgataagctatgaactcctttacccaaaccctgtcattaacatggaagatgcacaagatcatttattgtctactctagctaattggcctaggagataattcacataacaattgatttttatatactcatagccctgaaatttcctggctataaagacaaatcccttgctctatgtgtgtggtggcctggccatgccagttctcttaagtaaacagtcactctgtcgttatccacccaattctcaaaatcaagccccatgtaaatagtcatctccataaatcctgtcaagaaaattaatttttagggtacagtcattggttttattgtagtcctcctaatcctgtgtgacatagatcctttggaaagttggtgctaccagttgggaagtgccccagcaggccccgtggttgtctggctttgttgactgtctgaatgcaacacgttgacaatgggttagctgctttggttttagggttattctccttatgcctcatgcaaatgaaaagtggcaaaaaaaaaaaaaaaaaagaaaaaaaaacctcatttcctttcctagataaggcctgtaggggaatttcggctgttcttggtggcagtataatctcacaaaagatgtataaacacagtgctttgccaaatatttacagagctgaggggcaagaggtgggttggcatagggccagattaaaatgtcctggaaggttttctgtgattcctcagaatgccaaattcatatacatggtctcctcacctgtgaaatggggctaatggtaggacctgcctgctgatcttatcgtggggattgaggagataatgagagccgtgtgctccgtgacctgcctggtaataagccttcagtaaatgttaactcttagtactattagctcatctcagctactattctggaagaacacaaagctcacagctttggtgctaacccaccgggagttggccttatcctgaacagttgcaaaactcacccacagtccatcctgtgccggggagcagcttgcaggcaactcatttcttgagctcttccctgcccacacgtactgtgagttgccaagaaagcagcagctgcattcaccagtggaaattcccccggggcctcctcggacgccacccctacctctggttatgggcgaaggcgtaccaggggaatggcttcctccaccaactccttagtgtctgatgtaggtctctgactaccagtgtgagtcctgtggctcctcagcagtgtctctgcgcctgtctctgtcgtgctcctaagcaggcagagatgctggtggagaatatagtagaagggacttggggaaggactccattttcttaagtttcagtagaagtttggataacctgtagtttttaaagattgatgctcctgccttctttcctctcctcatggtaaccaaatggtttgaagttccctttgcccctgttcagaaactctgacccttgaataaaggggtaaagtatttagattctgaaagtttcatgggggaaaggggttaagggaaagcagtgtatgtgtgcaaatgctgacagtctgaatattacattatctatttcaacaaataaaccttggaccagatcaggctatccaatacagagacaacattgatctttcaggagggatctgccaagtctgaaatgccagctgtcccttcctgcccattagggggtagagaatgcctcttttggactagctgaaatactcattacaaatattcaggcctccccctaacctgaattaatgtattattgcttatccttttgtctctcccgtaaaaacatgtataaggagcattccctggtgattccctgagggttatggagggacattttacctgccagagtgtctccagcatcacagctggaggtgccgtgggtgggggtctgtgtgcctgtgtgtgtgcagcatgtgtgtatctactatataaaagctcattcattcccttgctataattcagtgttcagactcagcttgctgactgatggactgggggaagccagtaattcttaattcaggagaagaggctaagggagaacaaatctaccctcctgtctctcatcggcccccttgttctgaaacactgcagtggttcagagaagtcccctcttagagctttcatttcttttggagggatggtttgaacctagactggatctgccccatttttgccttagcaagtcttgatgagttcattggacagaggcaacaaaatccatatactcaagagactgaaaaaggggagaggagggaaggaacgtgtgtgaggccaaattgccccactgggggtgggattataaaggagtgcgacctttctggcaatacgtgttgtaagccttatgatgggcttatattttgactcagccactgcacccctagtatttatcagaaggaattaatgagaggtctatgcaacagtgagtggatttttacccctgtattatttactatagtaagagaaataatttaaatgtccaacaatactgatggttgggtagttttcacacagccatgaactacaatgcaactactgaaaattatattgctgataactgtttattaatatggggatattacataacaaaactactttgttgaagaaaacagagtgaaaaagtatgtaaattatggtgtcattttaatgcacaagatgaaatatgtatggatacatatatacacaaagaaaggttctaaaatagtcactaatgtgttaactgtggtacctggagtaggagtactgataagattggtttggttttgtcttttgcctgttgttttttaacaataagtatgaagtctttttatagctagaaacaacaaagtttctttctgtattaagaaaaaatttctgcattaaaaatatatgttatggggcatccctcctttttttcttttaccaaaaacgaagtagaaagaaagtaagctggctctgaatatttgaattaagcagagccctggagtcctccttgtttatttttgcttttccaaaagcaaatttttccaaaagcaaaaaatggctgcacacaccctaaggctatttatttccttccttaactccactactttatccggttcagcaagtatcaatccttgccattctgtcaagagagcactttctgtttaccagacacggtgcccacctcttgatgtatgttaactcctgcagtccacacaaacaccctttagggtaacttttaccctcgttttcaaaagaggggagtgaggcagagttgtcacaaggctggcgagcagaggagtgaagcttcccagccacactctgcctgcactacccctcccttgctttcccacttgaccttgcatccccggtgggaagtttctcactgaatgtcctctaggcctgtcttcctaaaggagccatcctatttaaagagccaggatttagcttctctgcagagatgagggcagggagagaagtaagaagttaagaggccatggctcagaaggaaaaggagggaggaaagctattgcaatggcccacctgccaccctcaagaaagccattctcagaagcctaacattcaaggatccagtccagcctaccttgtccagcttaggaatgggaactgtttgtcactcaccttgtggaatattataatatcaccttgtagagtattataataagaatgagcagtgccatctctggcagcatttgtatgaaacgttatgtcatgctgcttttaagaacatggagtccaaggataaagccaaccccaaggaggaagtaatgccctgtgactctgtccctttcccccaaccctgtccccactccatctccacatggggctcctaagaagccatccacagcagtgcctagggactcagactcctcactatgccaccatcagtatgagtgtggactgggaggtactgattcttccccatcttcccaggcctatttgctacaacatcaagcctctctttgataacaccagcttttctttgagcaaaccaatggagaaacagacatctcctgttttcctgccctgaaagaagagtctggggcttactgaagtttcataaatgagccagagctcaggattgacacctccatgtgaacatgaaattttgagctttgggcacaggtaatttgatacctgtggacctatttgccactggtaatacaacctgagcacctatgaacttgtctgtgaacattttccattggggagctttgctgtgcagacacagtgacagggctgtgctaagacaggaagtaatcctagaatgaaagctctagaacctgagatgtagtactttttctctctttccatttggttgcatgatgatgcaattctgtcttcattttcacttctgtgtggatcagtgccttaggatttagagatggtacaaataccaagtccttaaatctactcttcattttaaaataaaagcagcattttttcaggacaagccaagcatattctaattataacagctaccatttagtaaacactatatgccaggctttaatatactaagtatattgtatatattatctcctttaattatcaccaatcctatgaggtgtaagtattattaatgatccccattttgcaggcaaagaaaatgagggacacagaggttaagttgcccagggtgacacagctaataagtggcagagccagtaattgaaggctatctgaccctaaactcctgcacttaactgttaattcagtattcttaagaatattgttttcttttagaaatctgcttatcaagtatgacaagttttctctgaaaacagataacccatgaaactattgagaagcttccaagccattttttcctcttttctatttaatgtgtatttatgagatcatggaatggcatttcacctgtttcaacagcttctagggcaattcaagcaaattttctggaagtctgcttggtttgtgtcaggcatttcctggtcccttgtgtctgccgggcttgtggaggaggcgtgtggaagcttttttctgagccatccgccctgtggaagccacacaggcaaggccagaggagaacagtggcacaggcattcagaaaagcccagtttcccgacgtcagtttgcctgaggtcaggcggagcaccagcactttctggctcttagaaaatgactcaacccctccaacctgcagcttacccctatgcaaaatcagggctgcccttgcaggactgttgggacgagtcagtgacaggggagtgtccagccctacctggcatgtcataagtgcactctatccattgggagctgttattttagaagcaggacttcgtgttgttgctatgtcttgcctcagcagagagaaacattttgctcttgacactgattgtcccttctcagctgtaaggaggccacagcccccttgattttgaacccaaaaatggaaaatgagagcattccatctcacaggacactttcgcaaactacaccagcccagtctgatccctcccttctcagaatccctacagttcttttgaccaaatctcagattagcactaaaagtttattaattcagtggataagaagcttacacatatttccagagccaaaaagaataataaaatccatgcaaacaaataaaaggttttagaggaacaaagtaatcacaacagtgttttgctactaagtacaatacgtgggggcattcacacttcccagtcatttccagagctgacctagaacacaataggaaccaagatcagtggttcccatctctggttgctcatcagaaccacaaggccagagcaggaatagtattttgaagatatagcttcttaggccccaaccctgccatagtcattcaatttcttgctaatgttaggacttgccattttgtaaagtacatttgattttctttcatttttgtaattttgtcatttgtaatagtccttcccggaggggagtctcccttccttcctatagttttctgggagaatgacagaaaatttgagtatatatagtagagtaccattttgtcatgataaggctgggtgacaatgttggaagaaggaagagctgacagagacatgctgtggggttttggggatgacattgtggaaagtttaccctcactaacatttcaggtaggtatatttgaaagtgtagactgatgatttctgaagggaactgaatgagcttgtaccactgtgaccatgaataccgttgcaagtgaattaacataaatatactgacaaaaagtgagtagaactttagaactgttacatctcaggtagtgaaagtgagggtaacctagaaaaaggaggtgtaataactgtagtatcaaacagtgtgttgcatcctgcaaatagctagagatgtggcaggttacacagaagaagagaagtccctgggctgtttgtttggggcttgtgtagttccccgtttccaaaatggaacaagcgacatactcttttaagggtgcacagagacttcattgaaaaggcaagcatttgtttccctaaacagaatgactttttagctttaccaagaaacaatttcttgcaggaaaagtatgttttgctgttatcagctactactgggaattctgctacagacaggccaatgtttaccactgatcttctttccacagttctttcaaaataggaccctttccattaagttcacatagtattctgggaaaagtctctgtgattaagcaaagagactgtgaaggagcttaggcagaaatgggggttagctttgttttaatcctaaatgtttaaccataaaaaagatgcacttgggcttaagacagtgagccctcagcagtctactttgttgagatctcggctcagatgtcacccaaaagaagttgccctagccacagaatccaaattacacccacacaccctccccacccaggcacctgctttcacactgccttgattttagttgatttcatagctcttaataccacctaaaattatcttctttggttgtttacgagtttattttctgctttacacactcataagtagtatttcctaaattttttccattaggataataattaaaatattatcaaaaagcatgtacttccaataagtgtttgtttttatttacttaattataaagtgtatacctgccttagtaattgctatattacacacattagaaaacataaaaaatataaatgttataagaatcagatatttaaaatgccaataggagctttgatatttttctcctccaccagcctgtgttctcgcccaccctaccttgaagcctactgaacttgaatgtaagctgcctgagagcagagggcttgcttggcttgttacctgctgtgtttccagtgcctacaactgtgcctagcatgtactaggtgctaagtaaatatttgattattaaatatttattgttgagtagtaaacaaggctaaggcacaattcactcttccaggctcctaatagctaaggttttactacatctttggaggacagaaggaggggggggaaaaaaaaaaaaagacctggtttctggggttcagaatgccttcctaatacaatatgtgctgaataaggatttactgtaatgattcaaatccttcaccaaagaggtaattacagcttccttggtaagagcagagctcaggcagacagacaggtggtttctagtttctcttataacagatggcacaaatggaccagcttctgaagctttttgaggaaatttgctcataaacagttttaaatatttttcttttatatcttccaacacatgcttcttaaagtaaaaatgcttcagtagattgcaggcaagggcacatattatgaatagtgctgcacggggcagggtgcttgcagtttgcctgagtagcagatgcagcatgtcaggaacataagagggaggctctgtgcgccatggtggctagatatacattgaattttcgaagtgcttaaggaaaaaacaaagctgtccaccaagaattttatgatcagcaaaactattcttctcaaatgaaagtgaaataaagatattcccagacaatttctagaagaaagcataggagaaaatgtgtaggttaggcaaatacttagatttaacatcaaaagcacaatttaaaaagaaaaaaattaacaaattgaacttgaccaaaattaaaaatgtttgcccttcaaaagacaccactgaaaaaatgagaggacaagccacacactgggaaaatatatttgcaaatattatcactaataaagaacttgtatccagaatctatgcagaaatcttactactcaataagaacatggtgtccatagaatggaatagaattcagtaataaacatgaattgactacttatacacgccagaacatgggtgaacttcagaaaacatgctaaatgaaatgtcagacacaaaagaccacacaatatgcaattccacttttgtgaaatatctagaaaaggcagatctctagagttagaatgcagatcagtggttgcctgtggctgagcatgggagcagggcttaactgcaaatggcaggaaggacctttttggggtgatggtggcattataaaactgaatatggatgatgcttgcacagctccatcagtattctaaaagttgtacacttaagtaaggcagataaatttcatggtatataaattatacctcaataaagctgttttaaactctcccaggagtacaaagcattccttaaatgttgataactgttgttgtttttattattctgtaggtagtgtagacaaatgataccaaaattaagagagaaacattaaatgactgtgtacaccttgcttgagtggacaaatatgcttttcattcattaaattggctcttccaaataattaagtagatcttgggaaaatatatgccacacttttacaagagggtataaaaggattagtggccgagaacagaaatttccaaaatgtgagctgtgtgacactgagatagctgaaatagctttaagtggtgcttgggtgaactttattctatatactaataataatgagatattatttgcaatgggctaaagtagacatttgttaaagagatcaatctaaagaaaatattaagaaaatatgtattaaaattacatgtgatacacagatgtgacaaacgtcatgaaggtgggacactcatgactgagtttgggcgccaccacccagtagccaggagcaagaacaatgccagtgggtggctgagaatgaatactgaaacacaggcattcatccaagtttatgcccaatgtgcctgtctccctcccaaccagaaatgaaatgtctgaatgtccccttccatcgtatttgtcaggcctgtcttaggcaagccgacaagtggccatatgtggagctgtcgtgacaacaccagaatgagagctgtaccgttttatgacatcagataattctgactcagaaatgtctgccttccctgtctgccagcagtcttacccttggtttctggtagatccatttccattcttttaactatttacttgatcctgtggagtctttcttaaaaatacagtctttagatattgtcagttctaagcattcacagtgtgcaagagataaaagagggataagacaactgcaattcaatgtagcatcaagacgggaagaaaaacacagcccttgaagattccaaggagaaagatctaactcactggagaaagatcaaactcatcgtgatatcaaagaagcctgaggaaggaggtcgcatttgaaatgggctttgagtggcggatgagcagtggttacaggaaagggaaaggcatttcagatgggaacagcagcaccagcaggaacatggaggtgcaaaaggttaaagcatactcatggcacaagtaaagccatttgtttagaacaggggtaggcaaaccaaggcccacaggccacatccagccaggtgcctgcttgctctatggcttgtgagaaaagagtgtttttccattgttacattttaaatggttatataagtagctaaataatattctcagttttgcctcttggcctgcaatgtctaaactatttactttatggccccttaagaaaaagtttgctgacttggagacccctggggactttgaaggcaagtaatgagtactgagaggggagttggggctctattgtgaaacgccttggaatgaggaaacccagctagcttaagggaaaaaaatggaagtcataagctgacattttgggaagtctcatggtggatctaaccctcagcacatttggatttaagagcccaaattatcattttgcttggctcttcttccctctttttttttcatgttaacttcatttgcagacagatgttggccatgtaacatgaaaaaagatctctggtcaccctaagccaatacattttattgttggatccagaaagaagagcattcatatgcagtaggcgctcctcatctacggttttgctttccttggcttcagttacttatggtcaatgactgtctgaaaatattaaatgaaaaattataaaaacaaataatttgtaagttttaaacttcatagcattccaagtagcatgatgaagtcttgctccccacatgatgaagtcctgctccccgggacaggaatcatccctttgccacactgtggacactggccaccctttagttgtttagtagctacctcagttatcagattgactccaggtattacagtgcttattttcttttctttttttttttttttttttttttttgaggcagagtctcgctctgtcacccaggctggagtgcagtggcacgatctcggctcactgcaacctccgcctcccaggttcaagcgattctcctgccttagcctcttgaatagctgcgatcacaggtatacagccaccaaacctggctaatttttgtatttttagtaaaggtggggtttcaccatgttggccaggctggtctcgaactcctgagctcgggtgatctacccaccttggcctaccacaagtgctgggattacaggcgtgagccaccatgccccggcctacagtgcttatgttcaagtaacccttactttacttaacagtggccccaaagtccaagagtggtaatgctggcaatttgcatatgctaaagagaagccgtaaagtgcttcctgtaagtgaaaaggtgaaagttactgacttaaggaagggaaaatatatgctgaggctgctacggtttatggtacagtaagatattttgagacattacattcacataattttcattatattgttataattgttttatcattgtagttgttcatctcttattatgcttaaatgtataaattaaactttaccatagatatatacatataaaaaacatagtatatacatagtttggtactatccacggtttcaggcatccactgggcatcttggaacataaccaccgaggataagggggcactactttgttagactccacagatgaacaagggtcagttgtccacactgaccactgtggccagcctggatcacatgcctgccctgcagtgaaatcagcaggacactggactcacctgggtcacttaggatggaaaagaacttctccaagtgaaccagaagaaggggaatgcaaaaattctagaataaactgtaactacatattccagtctgccagagtaaggaatttattctacattcgttaagtaatgagaaatttatgagcaggaaaatgctcttcattcaacaacattcaacaaatatttattaagctatgtctttagcaggtgtttgtacttacagtgcacagtaggatggactggaatggtaaaaggtaaagaaaacaggctggagattcttataatagtctaggtgagaaggccttatcctatgagcaatggggaagcattgaagtgttttaagcagagaaatgatgtaatcatcagatttgaatttcgaaatgttcaccaagaatagttctcttaagttaagcatttatgtatgaaacctttttgcactataagtttgcttagtaacttgtagattatccagagtaaatttggatccacctcagatttggaaaaaaaaaaaaattttgtgagatcagaattgtgttttgccatgtccatttttcattgacttctctgtggatatttggttttgaaggacaagaactagaagagaatataaaaatgattttccttcaatttgtttttattcacagatggtgaaactctttttctccagcggaaagggtgattttgctggaaaatcatttaaagttttttccagtcaagtcaataagctcctcagaaccaaatgaacaaggggtaaaaatcaccatgaggcttagtaagattacattcctccatggcagcctgcgccagccattgtggagggccagcgggaacacagggagagtgtcaggtttgtgaatggtcacgctgaaggagcagggccaggtgtggaagatataaatggagtagagaagaagcttgaacagattaaaatcagatcagagacaattttccacatgtttagactactaaataagcaccagaattagagggaaggctgctactcgcttggagggaaagaaagagacttggagacttttagccttttcatcaaagttcatctctctttctctctctgtctcatctgcctttcatggtatccggaccaaggttcgtgcatttgcaagagtttaacttaatcatcctggacattgtccttgcagaagtgctgcttctattgctgaaaagtcctgaacatagtgaaatattatagtaggctccttactcaaggaatctcctctccagggttacctgtaagctgaaatgccttgggccactgctgctaattttagttactcctttgttttcagcagtggacatttagattcttattaaatctttttcctccccctagtccaaacaggaaatattccctgaaagtagaccatacaggaaagtatgccagagagccaatgcccctcagcctgtgttgttaacatgttgtgcagcttactcagaatgctacatcagagacatcctccttgacgtccccctaccccaggtaaaaggaagagaccattgatttactgtaataagtttcccaaaataaaaaagtctctaaaagagtcaacataatttctcagtgcagtaggcagagaaacagtacaagttgggagctgccaactgtattatgcaacctaaaccgtggattggtgcaacaaaggctgaactatcattttgcctctattaaacatccttcttctatggagtaaaagttgtagtttgggtggctggggagacttttttttttttgtaatatttattaagttgtggttataaaagtaacatgttaattgcaaaaatatgttttaaaagcacaaaaactttgcgtatgggaacaagggatataggggaattctgtactttctgctcaattttgctgtgaacctcaagcgactctaaaaaaataaagctatttaaaagttacctttaatctcatcacccagggaatgctactaatatgttaaggtacttactgttcatatgttttaagataggcttgaacgtgtattaaaaagtacatgaaatataaatgtacgtcttaacaaattattatttagcaaacaccccctaaataatactaaattattatttagtaaccaccccctcaccccccactggttaagaactgcagccttgctggtgtccacatctcttgctttctcctcccccatcacagtcctcttcttccccacaagggctctaatctcatgtttatggcaatcaattagtttttatttatattttaacctcataaatacagtccattcttgtttttcgcggtagtcatgttctataaagtcactgcaaacacggaattactgaatactaagccattgcatggaggggaaatacagagtgagcttcctgtaagcccctggtcacaacattttcatcacctgatcagtacaccaccctgttttatatgtatttctgcctaaagtcacctcatttaatattattgttgatttattaacattgaacttaggaccagcagcactgttaactcatgcctggagctcatctaacacacacattttctctataaggcacattacaaccttcttgtgcttaggaacatttgacagtgcttcagctgtatgcttaggggccattttaaatggcaaaatcaccattgaagagcatgaaaatgtggtactaggtagacctcaaacagacacttgtttacagtatgagagctgaaacaagaaggcagagctttgccttgtttgacctcagctgggaatgtgccgttgggcgactcaaggtttttgctgctctgcacatgtcctcggatgacctcaacagcaccccagatgttgattttgaggttacagatacattttagtaagtaggtgaatttgcaaataaggaatatggaaataatgaggatagactgtatatatccctaaatgcaacattttattgttttgagttcaacttcatttgctcaaccacatttaagtcatttatgttgctgtagttcattttcattgctgtagagtgcaccattgtattaatacacaaaaattatttttttattccactttttctaaaattttgaatttccattttctgcttttacaaataatttgctctacacattctaatacatgtcttccagtgtacacataacacacctttctctggggtgtatgtctagcaatggaactactgggtccaagggaatggtatcttcacctttgctagataatgctacactatttttgaaaatgattgtagcaatttacacccctcctgcagcaaaatatgagttacagatgagaatgagatgtacctcattctcataaacctctggtatttccagcattttgatgttagctatttagtcattctggtgggtgtgcagtaacatctcactgtggttttaatctgcatttcctgcagcacagaaaggttgagtgccttttcttttggattttctcttttaacatccctattcaggtttcttgcccatttcccacttggttgtgttttactcaccagtaagaaatctttacatagtctggttataaaccctttgttcatttttatgttgtaggctgcctttttacccttttaatattgtttttgatatgccctctctatgccctactggataaattccaacccctgtttgggaaccttcagtttctggaattatttcttctaaaatctttattgtttgcctttggcatttaggtctataatccatctggaacacatttgttatgtatggtgtgaggtaggggattctgtcatttttttccatatagatatccagttagtctagcaccgtgtataaaagagcactttccactagtagcataaaatcgtataggcccatgataaattcctaacagtataaataaaaaagtgaatgtctagtccatatctgtacatccagttccccactctcaaccccctgaggcagtcatagtttcttgcttacagattttaagaatcatgtttaaacatctctagcatttaaacagtggctttagattataccccagaacaacgaaagattggatgtagtagcactattgcgtcccttttatttgtatgttacttgagtgaatttgttttggcaagcacaatatcttcattatgtggagaaaggcaattgtaccatactcaatttaagagttatatgcctagtaaggaagtattgggatttcttagcaactattcagatcttttgagatagcaattgttaccatatgaacactttataatgcccccaaaatgctttagtgttttcttacaaataaattcacatattgtgaaattttttagttgagagaaatttttattctaggcagttctgttgtgcctgaaatgcggtattggaaaagattgagaggctacacttaggttcaacaggaaagaatattaaggtcaataagtattgtgagccacggtgcacaatagaagcattctgcccatttaacctttctgaccctttcccttgaggtttttctgtacaatgagcaattgaactaggactgttgtccagatgtctttgtttccaatctggaatttttccctctacctcatatttctgtattattcagtgagaaaagattcggattattgacttggggaacattaaggatgatgtatgcgctattccaaaatcttgaattttgtttaaatcatagaattacttaccattcctactcaccccatctaagtttaaagtttatttaaaacttcagaaattattttatttgtgtaaataatttcaacttttagattcagggagtacatgtacaggtttgttccatgggtatattgtgtgatgctgaggtttggggtacaaatgatcccatctcccaggtggtggccacagtacccaatagtttaagaattattttttaaagctagaaaacagaaccgctgcattgtaaactagtcaagctatttttaaagtaaattattgaagaagtattttaaaatgcatttccctattattgttaagaccttaaggggatttcactagtttcattaaaataagaaaccgaactctgtcattgtttaaataaaaatgcatgttaaattatattagatgaggggaaataatctgtgcaaagacatctgcacatgagtagtagaaaagaacacgaaacagtcaagctcagggacttgtggattttttctgctcataaagttgtgaagtacatactgaaaatccaggaggttaggacttatataggatttctttgttgtaaaagcttgagtggacacacataaggaatatatgtcttcagattttcaacagataaaaactggttttgtgtcatttggtctggttcaccagtagccaatttaccactgttccttttggctctattttcttggctaaagtttgatttccctttaccttaagtcaagccagaaagggatattttccaaggaagaagaattcaatgaaatgggattagattagataggacattttagattttcatggaattttcttctctttttcatcataggggcaaaatcaaagccgccccctgttagtttaatagcaccatcaccacctaacagtctaacctggaaggggaactgacagcataaagaccagccctgggccggtgatccgaggctcagcccaggcctgagacatatcactggggacctggactgcagatcatgggccactgcctggcagagacgtgcaaatgccaattttgctgcttctccaaagtctgacactgtggagactcttagtgcaagactctcaggcccttccttgtgtgccttatccctctgacttcatccttgttttgaaagtcctacactaagctacaaatccactactttcttttcctctgggagcagccatacctttcaactagggggtctcacatctccaggttgtggatatctgtctctttatccatcagcctgtctccttccccacacaaccctcttgtcaaaatgccctttggaaaattaaacattgcttccacgtggaaacagaacacaggaagggaattgtattcattcgtacatcactgaaaagaccaggaaagcaaagagtccagggtaacctctgaacactgaaaaaatgttcatctaatttttttctaatgatcatgctcaatgttggtggggtaatggtgagaaggaattgtcagtgttggtggaaatgcacagcagtagaacctttctggaaagctatttggcacggtatatcaacacctttaaaagaaactcctagcctttgacccactaattttactttcaggaatttatgctaaggaaacaattgagacactggcagggattctctacaaagatgtgagttgcaatgctatttataatagctaaagggggataggagtctgaatatacacaataagaaaatggttacagaaatcagagtataccatacaatagaacagcctgtagccattttaaaaatatgttatcaaaggctatataattgcattggaaaatgccttattaagggaaaaaaaggagggtattaactacatgtgtagtataattctccaaaaaaaagcgaggagaaatatgccaaagtgttaacagtgattatcagtggcataaattatgtatggttgtatttcttttcttcttggtttttggtattttccaattttctacaaggccgtcagtaattttcattattagaattttgaaagattaactttcttcttcgtggtcagcttactcctccagttacagaacctctcatcttatagcagctctactactgtggtgtggagatcagagagggtctgccacatcccttgtcagactgggagcctgcctgggcagccctgccacagtatggcaggcatgccctggctggtccagcagatgttccatcattcaagtgagtcaccacagaagggtgtcaagctgatgatattgctacacactgtacttgaactatcagccacaacccattatgctgccaagccttttagccttatcttcctaaaccgttattctttcactgtccagtgaatttcagagactgactgggactgtctgactccttttgaggacactgtgggccagcaaactaaagtggatgtaagcctaccagttgaatccaaaccagaccagcaaatgttccttgcatgctacagtgtatgctgtgttgttgctgtcattgggcctagatgtgggggcctggcaggaccccaggaatatttaggggcactgggcattcagcttaatacacccatctggactctgagggttgtaggaatgcctttagcagtcatctgctaaaattgtagttataaaatcattttctcctcttttaattgtttgttatccttggcttcattagtgggaaaggggttgcaaatttgatattggaggtttcagagccaggagtgaaattgaccattttgaaatttgtctgttttgttttgggtttggtgaggggcaggagggagcaagatttttattttgtttatttatgtatttatttttgtctgccgttgtcatttttaagtaacctacagccagacacttctgtagtgaaaggagaatttaagattctacaaagagtcttgggccataataaccatccctgtgcgtcttatatctcacatatgtgttctatgagtatgagaacacatagtcatacacccttagttttgcatcagaactaaaatacaatgtactctctatttcttgtctgtttacagtccttctgttgcgacatgcatctttgcagtacataaaatgtgcagtagtattgttgataggattattgccatgactctaaagtacaaataaacaaaaggcataattcctttagtcatttaaaaaatcacagaagtgaagagtgctgtagatgtctgttaggtccgcttggtccagtgctgagttcaagtcctgaatatccttgttaattttctatcttgatctgtctaatatctcagtggggtggtaaagtctcccactattattgtgtggtagtataagtctctttgtaagtctctaagaacttgctttatgaatctgggtgctcctgtattaggtacatatatatttaggatagttagctcttcctgttgcattaagttagctcttctttttgcattgatccctttaccattatttaatgcacttctttgtcttttttcatctttgttggttttaagtgttttatcagagactaggattgcaacccctgcttttttttttttccatttgcttggtaaattgaagtgaactgccattcacaattgctacaaagagaataaaatacctaggaatacaacttacaagggatatgaaggacctcttcaaggaaaactacagaccactgctcgaggaaataagacaaggacacaaacaaatggaaaaacattccatgttcatggataggaagaatcagtatcatgaaaatagccataaaatagccatactgcccaaagtaattgatagattcaatgctatccccatcaagctaccactgacttccttcacagaattagaaaaaactactttaaatttcatatggaaccaaaaaagagcccgtatagccaagacaatcctaagcaaaaaaacaaagctggagggaacatgctacctggattcaaactatattacaaggctccagaaaccaaaacagcatggtactggtaccaaaacagatatatagatcaatggaacagaacagaggcctcagaaatgacgccacacatctacaaccatctgatctctgacaaacctgataaaaacaagcaatggggaaaggatttcctatttaataaatgctgttgggaaaattggctagccatatgcagaaaactgaaactggaccccttccttacattttatacaaaaattagctcaagatggattaaagacttaaatgtaagacctaaagccgtaaaaactctagaagaaaacctaggcaataccattcaggacattggcatggtcaaagacttcatgactaaaacaccaaaagcaatggcaacaaaagccaagattgacaaatgtgatctaattaaactaaaaagcttctgcacagcagaagaaactatcatcagagtgaacaggcaacctacagaatgggagaaaatttttgcaatctatctgacaaagggctaatatccagaatctacaaggaacttaaacaaatttacaagaaaaaaaaacaaccccatcaaaaagtgggtgaaggatatgaacagatacttctcaaaagaagacatttatgtggcaaacaaacatataaaaaaaacactcatcatcactggtcattagagaaatgcaaatcaaaaccacagtgagataccatctcatgccagttagaatggcaatcattaaaaagtcaggaaacaacacatgctggagaggatgtggagaaacaggaatgcttttacactgttgctggggttgtaaattggttcaaccattgtggaagacagtgtggcgatttttcaaggatctagagccagacataccatttgacccagcaatcccactactgtgtatacacccaaaggattataaatcattctactataaagacacatgcacacgtatgtttattgcagcactgttcacaatagcaaagacttggaaccaacccaaatgcccatcagtgatagactggataaagaaaatgtggcacatatacaccatggaatactatgcagccataaaaaaggatgacttcatgtcctttgcagggacatggatgaagctggaaaccatcattctcagcaaactaacacaggaacagaaaaccaaacaccgcatgttctcactcataagtgggagttagtgagaacacatggacacagggaggggaacatcacacaccggggcctgtcagggggtagggggctaggggagggatagcattaggagaaatacctaatgtagatgatgggttgatgggtgcagcaaaccatcatggcacgtgtatatctatgtaacaaacctgcacattctgcacatgtatcccagaacttaaagtataattaaaaaaaaaaaaatcacagaagtactatggagtatgcattttattattataccaattcaaacatagtggtaataaatgttaaaatgcagtcactttataccaaatgttactgctatggctaaaacataaacaaatgaaattctgaaattctgttgttaaaaattgcatttgaggccaggcatggtggctcatgcctgtaattccagcactttgggaggccaaggtgggtggaacacctgaggtcaggagttcaagaccagcctgaccaacatggtgaaaccctgtctctactaaaaatacaaaaaattagccaggcatggtgggggggatctataatcccagctacttgggaggctgaggtaggagaatcgcttgaacccaagaggcagaggttgcagtgagccaagattgtgccattgcactccagcctgggcgacaagagcaaaactccgtctccagaagaaaaaattgcagttgatactacggtaattgacatggggattgaggagtaagttattataatagttacgaatatcctgcattccagccgcacccccagataatttcagccgtgtagttctggccaaaaaccacttagatatctgaggatgtgaaaaacatttagaacccacattgtgttcacagaatatgttccaaactatgccattagccaaaggcataattcttggtacagatggaataggaagctggaggtgtttcctacttattaaagtcatttaaaaaaaaaaaagttggaaggactttttaattgtcctgtggtaaccactgaccaaaagaacagattggtacaagcccctgggtctgggctgttctcttgaacctccaaattgtccctggttctgcttgggttcctgggctgggctgtggtttgaaagttgttgccaggccttgcctactaggtcattgtctggtggggcagggttgtgttgagaggactgagaaagtgaggcctctctgactagcagcaactgtggaagaaaatggagactgcacagtagagaggagttgacacttttcctaggactcaagacagagtcaagggggagccaggtattaagctagtactagcttagccctcaactgatggatcttactgtcttacattactgttgtttttaaatctgtcgcttcttgtcaaatatattttaagctcttgaagtcaagggaccttggcaaatatcatttattgtattgaacatactgagtgctcaatgactagtttttgctggattaagaaaaaaaagctttaaagagtcatactctttacattttatttcttctcttatatgaatgccatctgctatatgaatccgccagaccgaacactggaggcaggattggggattttgttggaatttagaatatgttgagtcttattgtgattctctatcactgtattgtcattttcccttgcaaatagggtaggtatctaaaggaaacacatgaatcagtggttaagaagaattctaatgctatgactgagtctgtaaagaagcttggcacaggctagaggaacagggcaagtcctgctatgtcagagggagtacgctggctgcaggagccctgggcttagaatcagcagatgaggtttgaacctcagccctgttacttataggctgggtatccttagagaagcctcagcttagcccaggtttccacatctgtgaaatgggaattatagcagtacttgtttgtgggcttgttgcgtgggtaaatgagactcattaatttactcagtaatgatttgttaaatatagtacctacagacactggatattttagacactggatatacagcagtaagcaaaacaaaagcctctgcctcatggaatttatgttctaaaaatatacgtaatggaatttaataaagtgtttatcagtcacattagtttgagcctctctgatgaactcacactgtggtttttgctgttatttgtctataggtgttacaacagtaagtaattagggctattattgggtctcatgtttgaattggtataaccctagggaagtcccagtaagtaggacatttgtgtgtgcctgctaaattgcagtacgcttagaaagtctgttccccttgaaccggatttctgtcatttttgcccccatgaagggcttgtttcaaatagttcagcagtccgctgagattcaggagtggcaagtggtggtgtggctgaactggtttctctctgtcattggtgtttgcactatttgtgatgtatgatttcacagagttgtgaaggtgcttgtgtcatttgtggaaataagtcaaagggctaacacaaccaattaaaatccacaagccacgtttcagtgagtaatttcaacctttcctctccaaacttttgattagctacccgtcaaggaacaaaatgaacaaattgaaggtttcagttcgtttttttcattgccttccctctggggctttttctttgagtatcgtaatgcccaaattccacgaaaggagaaagggcaagcccaggcagcaaacctcagaggaaccgcattctgctggtaattgcatgccgtctcccaagaggtgtatctgtattcacctccatcggctatcaccttcttcatgcagtacttcagatctccagtggcacacagcccatctagttaaaaatgcaaacaggagattattttctcaccgaatggcctttgtggcccagaagaaaaaaaacatggtcatttctgctgagacgtaacctgaaaaacactcccacaagagtggaagctgaaggctcgctataagctagccctgcctcagaacaaggctggtgatagcacgtgggtgtgggaactcatgtgcgtgggctcagggcatttgtcgccaatgtacatgatcgaagaagcttctatcacctgaaaagcagttgttctgcagggcaaagcctgtttatactccgaggaattacagaacagacgtttacttggacgtggagatttggtctggaggaatgtgacatggccctgacagcacatccctgggtttcggtgctcctctgctctgcccagctttccgtcatctggcctcccatgacctcctgtgctcccattgtggtttccctgtgtgctgacaagttttctggttgttatgtcttgcagccccccgaatccaagcccaacttcacccctctcgccatcttggcccatgttctcggcgccatccagccctatgcccacctcatccacgtccagcgactcatcccccgtcaggtctgttgcagggtttgtttggttttctgttgctgccgttgttctctcattggctcggtcctctcttcatgcagtgttcagcctcctcgtcaactttgttccctgccatccaaacctgcacttgctttttgacaggccagaagaagcggtacatgaagactccaggtaaaatctcggatgatgaccaatctgttcccgtttatccaaagctggccagggacaacagggggctgcccctgctctcctgtggttccatcctaagagaccagagctaaaagggaccatttgcatgaatcagcatggcatttttcacacccttttcaaccctgactcaagtttctgaattaacctctctggtgcctagagttaggggaaggagcacctcctgaaccagactctggttttgatggctctctcaatttcatgtgctctctgcactttggtgtaagataacataagaggaaacagtgttgggacatgtgccaaccttttcttttctcatgtttatcaggcagcgtcaggcaatatttatttgtggggttgggcccctggccctaagcactgacacccagtcacttagaccagatccactgggggagagacgtcgaacatagaataaaagcttgagagacgaagcgatttctcttaaattgctcacggcttatgcctcgttgtcccccatatactcccgaaaccatccatgctcccagcctgcttctgtctctgtgtgtcatgaagcctgagctgtcctgggaacaggcactacctctctctgagggagagcagcttgacctagttcctcttctcagggccatgctgtagttttccctgcttttgtgacttccgcacttaagttttttgctcttgtgctctttgggaaaaaaaaagagctctttacaaccgggaaaagaacgaatagggatcctgcagaattcctatgctgtggagctcctaaacgtgcttctctctcaagcttagtctcagctttcagacaaccaaattgtagagcccagttataagcatcagaagcgttttgggctttgggagtattttcccttctgtctttttctccaaagggtggatccagcagagaggcttaaataatttatgaagccgagtttcacttttagaagaaaagaaaaccccatgctatttatatatatacagatacatatattactttattccccactaggcacttacacatctatcatttcattctatcctcgtgtgagaatgagaagagaaatggcctgaaccctactgtggaaaaagaaaactaaaacacagggaggtgacttggacacaatgctatgactaaatgagagccaatccagaattcaggacttctccccctcagctcagcactctttcctccaaacacgtgggtaaccccaactttgagtttccgtgcagctcccagcccagagcctgacttgctcttttaggttttatacagctttctacctggctttgtcctggatgatgggaaggagattttcagtaattcttttttttctcactctataaataagggaaattttcagatcatgtcttcctgacattctagtgatttcctaatcatttcttggacatcttctgggcactttgggagacatcaactttctaagataccagaaatagcatagattattctcattagatcatgaggacctgaaccagaggaaactaagtgaccacagacaagtcagcttccaaaatgcctcacttactcattagagaaacttgggctttaggaaaatgtaattccttcatttttatcaaaatggagtaaaaatcttcaaaatattggccctttggacaaaatgggttaagagactcaagagagtgaaatcactcagctaaaatcctaaaatgtcctctctgccttgatggtactcacttttttgtgactctgagatttggggccctgtttcttgtcaagtatctctacctcttcactcgttttcatctccccaaatatttccagactgtttttccttcctacttcttcctacctcccaaagtatttccagattgacagagggcaatggcaatagaatctgccattctgttgccatcttgtgtgtctggggtcacagttactcagtacctcctcccctggccattgttagaatagcactatttggacaccctttaggaagctgccctcttgaaatagtcaaggcaggccgggcacagtggttcacagctgtaatcccagcactttgggaggccaaggtggggagatcacccgaggtgaggagttcaagaccagcctggacaacgtgacaaaaccccatctctactaaaaatacaaaaattagccaggcatggtggtgggcgcctgtaatcccagctactcaggaggctaaggcaggaggattgcttgaacctgggaggcaaagtttgcagtgagccaagatcgtgccattgcattccagtctgggtgacagagctagactccatctcaaaaaaaaaaaaaatagtcaaggcagagttggactaaatgtgtgtgcccagatgagcacagacagcaacactgctgaggagctagcccatcagaggaacagagagggccgaaacctgtacactgtagtgtatagcaaagaggtggtggtatacacccattattcaggtccactggggcctccctcaaatccacttccagagcatgaagcttcagatttccttccctgagcaaagcctttataagtaaatattgaattagatctaatcagtggtcccatgaacttctgaatgatgtctcctctggaaattgcttactgtctgaattagtctgttttcatgctgctgataaaaacatacccgagactgggaagaaaaagacgtttaacggacttgcagttccacgtggctggggaggcctcacaatcctggcagaaggcaaggaggaggaagtcacgtctttcatggatggcggcaggcaaaaagagagtttgtgcagggaaactcccgttttttaaaatcatcagatctcgtgagacccattcagtattatgagaacagtacaggaaagaccgtccccagtgattcaatcatctcccaccgagtctctcccacaacacgggaatgatgggagctacaagatgagattcaggtggggacacagagccaaaccatatcactgtcccctcttcaaaccatttatagaccttgtttgttcaaagtcaggaatgaagatgccttttgcagcacagtagagaaagggtgctggagacacattccctccgtatttcccttttctttcacttgctcacccctcccccaaaaaagccgatagccccaaacccgtaacttgcatttgcccaggggtccctggaaattatgcctaaatgatcaacccctttccacctgccagtctagctggtcccacctccctgtagtgccatatgatggcgaatgggtcatcattttgcaaggtttgcaagggcatttgagggaaactcctgtgagtgctttccaggccttgtgccatgctcagaggtgaaaattaaaagggaactagcaggaggatcccaacttgttcatgcccttaaaggcccagctgaggtctgaagggcactgttgacaggagcagccgaaaactaccccaggccctctgtatccagttttgagatatactgtggagaataggaagccaaagaaccaatgatgcctggtggagattttttattttatttttttatcagagccaaagcctacaaatacaatctctctgccaacaggatttgtctgttttggtaggaaccctacctaaagcaaactgcttaagacctttcagaaggagttatgggacacttgacttgttgggctgacaagcttttaagaagataagactttttgggtagggttgccagatttagcaaataaaataaaaatacagcagacccagttaaatttggatggtagataaacaacaaaaattttttcatatatgtatgtcccatgcaatatttgggacataacgtatactaaagaaatatttattgtttattctgccatccaaatctaactaggtgtcctgtattttatctggcaaccctacccattcctattccttgggcaacaggaatggccccctttaaaagcacctcttctgtcatttctcccatttttgtgcctatcctaaagcagtagagggagatctcaagggaaaagccctcccatagactgtcagttgcctatcaacttgagaaaaaaacaaggccctttcttggcttgcttatttatttatttacctacttactttttttttttttttgagccagggtctcacttgactagagtgcagtggtgcaatctcagctcactgcggctcccacctcctgggctcaagcaatcctcctgcctcagcctcccaagtaacctggactccacacgtgtcccatcatgcctggctaattttttttatttttttgtagagatggaggtctctacagtctggtcttaaattcctgggctcaagcaatcctcccacctcccaaagtgctaggattacaggcatgtgccacagtgcctagtttgttattttttaacgtactatgttattgccacttcattattcaatttcacaaacctaatatcaatggaatgttactccttttgaatgataatcttgggcacctggaccactcccttttatttctggctgccaaatacccctgctggttttccagcttgcccctgttttgtcccattatccttgtttagtgaggttaataaataatgtttgtgaaaatccagtcagaggagcctttcctcagatgctgtttcccttacttttagtcccccttccctggtctctttgctttttacccacctgctctgccctgtcctcaagaggcagaaatactgcctcaaaacctggtctctgagaccctggctaatgtgaactggattctcctttcaccttcaatgtcagtgtcataacaggctccatttgcctgtcagtatagtcttttatctgttttagcacttttcacagccaagtcactcctcctgtctgcttcccagcctctcaagaaaaaaaaaaaaaaaaaatgcctcttatattcctccctggaaagttgcacataggatgtttggtccttgctggccaatacatagactcggtttctttggctcacaggcagtgccccttgtcctgaactttattctgtcatcataattagccaggaagagctgttttcctgttggagctggtgaatactaaggactcttctttcctttgttcccaggggtcccacttcattttcccccactttcccaatgttttcccacctggccatcatctcttggctcctagaaaaccagagggaacaacagtaaactatggcccagcaataaattcgagataaccatttactctgatcactctgcacgatggagaccatgtggctcacaaagcctgaaatatttaccacccggccctttgcagagaaagtttgccaccttctgctctagaacagtggttctcaaccctcactgcacgttggaattacttggagagcttttttaaaatactgatgcctggccgggcgcggtggctcacgcctgtaatcccagcactttgggaggctgaggcaggcggatcacgaggtcaggagattgagaccatcctggctaacacggtgaaaccctgtctctactaaaaatacaataaattagccaggcttggtagcaggcgcctgtagtcccagctactcgggaggctgaggcaggagaatggcgtgaacccaggaggcggagcttgcagtgagccgagatcgcaccactgcactccagcctgggcgacagagcaagactccgtctaaacaaacaaacaaaaactactgatgcctgtataatatctgcatatctgggtagaacctagacatctgcattttctaaatgctccccaggtgtttcggatgcacagtgagagtgattgtaaacattcaacggacatgagaaaagcaaaaacaaaccaaaaaaaatgcctcatgtcccctctcccttcttcctcctccccacactccccatacaggtgcacgtgtgtgctcatgcacacacatgtgtaattgccctcatgcaccttgtctattccctcccctgggggttggagagctccagctctggaatcctgtctcaccagcaagacccagtctagtaagaaatcaggaacatctgggagagctcatgtccgcccgtggcctggaactgaaacttggctttgctggaatttcttctttttgactcactgagcattgccagctttcaacaggttctgttgggagtgtgttccccagagcagcttggaacttctttcctgcccctgcttccctcccttcccccaaggcactcctgctccaaaaatggggcccagcctgccctcccgctgtttggctgttgtaactcccaggtaaagttttaacatggcacaaggtgaccccacaaaaagtgtagtttcttgaagcttatggcttttctctgaatatttctcatttttctcctgtgatctttgcagctttcccacctcatgtcttgccatctggctgccttgccaggcacttcccacgagaggggactaggtagcttacagggaaagggaagaagagagatgaaatgtctggggctttctaagggttttttcaaaaatgttaaataaactcctgttttcacacagcacaccgttccggaaggcaaaagccttgtatgcctgcaaagctgaacatgactcagaactttcgttcacagcaggcacggtcttcgataacggtgagtttctcatcccctcacaaagatatgggcggggggcgggggcaaggggagcacataaataactggcattttcaaagctcctcccgagggaaaatctcaatacaatgggtaagaaaaaaagtgtgtgtgcgtctgtgtgtgttggtttctgtgtcttttcccaaaataaaatagcagcagcaggacttccggagacattgtgaagagtggactagtgtaatcagctccatgttgagttgttaccactgtaaatgagattgtgcctgcaaaagacccagcccaggacctggaagtggctttaagagatcatacacatcacatgtttaaaatggtactcaacatgtattaagcattcactaaattaatatttttattattaaaaccatcatcatcattgtatccatcttcgaaaaaggccctgatgctctcatagttcacagtgacagtttttcctcacttttgtctgggcagtgggtgctgcacctgattccgtgggtcctggctgcatctgtaaacacattccaggccagagcagagatgagttcctggggaccagcccttgactgtagtcacgtccacaggggctgccattgtgtgtgcccagcccctgcattcagcatagcagagatatccatcaggtacaggtagacaaaagggggaacaaggcacagaacatgagggtctctcccaggtcacactcaacccttggccttctgggtcagcaggagtgggagggattaccccagaactgcatgtgggcgtctgagtctgcattcccttttatcgttctcaaagcctcaagcactgtccttaagcctttgctccattaactttcatctaggccctttataaatcaaaatgcacgaacagccagcccagccacctctcctgtccacagctggtgcttgcaggccccagcagactgcaggtgcagtgggtctgctgaaggctgtccaaagccatttcactggtgagtgtcccccacacaggcccaggcggcggagtcctggccctgccgtaacatgacacggcccttgcagaagacaaaccagaatgggctgcgttgcttgggcttctgcccccctgctttgtcagcaaggaaggggcttctgcctatagaagagcaggatttgagagattcctacattgacaggtgaatccagggcttaaaggtctgtcctctaagtcccaattcactgctcatatgggcaggggatcatcatgtttctaacaaccattccctctgacaacacaaaggactcctgatctcaggggcagaattgttttaaactatcaaaagttatgtatatgcttctgtcttctttttgattccttttggtgagtgcagccttcttccattttttaacggtttattaagatagccatacaacatacaatttacccatttaaaatgtacaattcaatggtttttagtatattcagagttgtgcaaccattgccactatataattccagaatattttcatcacccccaaaagaaaccccataccttttagcagtcatgccccacttaccacaacccatttccatccagcccaaggcaaccactcttctactttgtctctctagatttgcctgctccggacatttcatacaaatggaattatatagtatgtgatctttgaaactggattctttagtttgcataatgttttcaaggttcatccacattgtagcatgtcagaaccttcttcctttttatgtgcgatggtatggatatagcacattttatgtaagcttattcatcagtagatgggcacgttgtttcctctttttggctgcttgaataatgctgctgtgaacatgtgtgtaggtttttgtgagggcgtaggtttccagttctcttggggatatacctaggagtgggattgcagggtcatattaattccgtgtttaagtgtttgaggaaatgccgaactgtttcacaaagaagttgcaccattttaccattttatgttcctaccttctttcatttttaagtctttctgcagtagcttaaatagttaagcataaagggggaaaaaggaagagaagcctggatgattgttaactgccaagtcctttttttccccagcagagtgtccttcagcttccacagccatcttcactgccacaccgaagctccgggcacctccacctctcacctgggcacttccactggccgcctgacacatcttctcacatctgctcttgctgccataaccccctctttacagagcagcgagagtgatctttgaaaaacggaaatggcattaaagcccttcagtggcctcccattgctctgagaattacttacaaggccctccagggcccagttcctgcccctctgacctcacgccctcacttgacatactacagcctcatgccttcttcatgttctcaagcaaggtcggcaaactatgacctgcccgtcaaatccaacctgccacctgtcacctaacaattctgtaactgctcccacatacaacatggtcgtcatcataaatcctataggtattgttgagagcaggaggaaagtttggttgagtgagtgagagaccttacccaagccttcctgtggtctctaggagtcatggcagagttcgctgacactggtctgcttttaaccagccttgccagtgacctttcaaattccctgaggagcaaaaggccaaattgaacctgaaagaaaacacctctcagtgttgactgagttgcagtagaaaatggacctgacaaaacgttagtacactttctcaattgggttagctcaaaatatgttattaggtcttttttccagaggaaaatgcttacacagaccctcttcctccccactccttcacctctacaggagaaaatgaggcattacagaacactattattctgtcaggcggtgggtggggtggggggtctttttccttgttccatttcttgttagtttactgctggggatatgaggtaaaggctgtttaatttgtatgctgtgtagttgtcagattaaatgatcaaaccaatcagaaagtgcacgtgtgtgtgtgtatgtgtgtctttttgtgtgtttcaggattaagaagaatgaataaggaagaggaaaagggaggggcccgtggaggggaaagtctgttgtttcgtaatgattaatcttgaagcctttggattccaggggcccctactgtgactctggagtggctgctgctgtcagctcatgggctttgtgcagtgggaaatggatgtgcaatacgtgcaatacctagaaataattccagtgtcatccctggccaatctactgggaaactgtccatttcaacaagagcacctcagacagtaactggaaagagaaatagctcatattctcaggaacgttagtcatcttgaagcagcatgattcgtgatacctggaaaatgcacatggcagtcactaaaattgggttctagggatacttttaataagatttgagaggagctggatccattcattcccatggtacctaacacagcaccactacacagcaggcctgtcccaaatttcctttgctgctggagaacatcctcatgggggagcccccaagctgcctaggaaatgggttaacaggagggcactcagggatctccttcagtttctccagccatcttcgctgccacgcccaagcccaggccaccttcacctctcacctgggcgcttccactggccgcctgacacatcttgtcactggcttccactcttgctcccagaaccccttcttcacatagcagcaagagtcatctttgaaaatgaaaatcacatcatgttatttcctgcttaaaatctatcagtggcctcccactgctctgagaatgacttacaaggcccctagggcctagttcctacccctctgacctcctctcaccctcacttgacatactgcagctttgcaggccttctttatgttctcaagtaaggtcagcaaactatgacctgccagtcaaatccaacccgccacctgtttttgtaaataaagctttactggaacacagacactcatgcctttgtgtctgcgtgttatctgtggcactacagtggcagagttaaggagagagacactctcactatgaggccctttaagaaatagatgcacaccactgttctaaaatcatgcccagctttttcccgtcacagggccgttgtacttgcactacccactgctctagtctttctctctccttttaccactacctaaaattatatgcttgcttattgcttgattgtcctgccgagcaaaatctggtctgcttgttctgtgctatgtgcaaggacctagcatggtgtctagcacgtggtaggtgctcagtaaacatttgttaaatgagtgaatgtactttaattacccaggggtctgcacctcttttagttaagacttcttttggggacagtcagccattagagaccttagtcacacacttgctccctgtccatggtgagtgaaggagggcagaagacatgagttgtgtacacagggatgtatggtgtacatgggtagagccgagagaaagtggttggcaggaagctcacccatgtccccagcagcttatatttagtatatgctgttgagctgaagagccactcaggcagcttgtggcaacaccttttgtgtttgtatagcatgttggacactggtgcagttcagtgttgcacattggcgccattcagcccaacaagcacttagcatctttgatgttcagagcattgggctaggcaacagcagtagtagttaaggtgacagactctgggatcagatgtcttggtctctgattcattttcattgtctaccagctattaatatttaattttggccaagatgcttaacttttcacagccacagtttttcatcagtaaagtgaggataatagcagaaccaactccatagtcattctgaagatgaaaggaggaaactcaggtgtgaagtgcgtattcgcaaagggtctgccacctggcatgtgctcaacatgttatcatccttatcagcatgggtcacaccctctggttaaatagaggcctgatacagtgggaagggagttggtctctggagtcaaacaagctgggttcaaattttggttccagtattatgaccatgcacaaattattttacctctctgagccttaattttctcatctgcaaaatacagataataataatacaagctgggatcctgaggatcaaatgaatcaacatgtctaaaactccaagcacacagcagcttcataacatatctaagtgttagcttgtatcattataattcacgaggcagaagggagttactgaaggttgtggagccaggaagtgctataatccaaaccaaaacgcactgaaaaactagatagagaagcaaagcttagcacgtttgaacagcatataaataggacccatgaatactatgtggaatgtactatgagcattttaggtgtctggaggaggagggagcaggtagaagggattccatggtagtatttacaaaggaagtggggcttcagctaagcctttacatggaaacagaagacagcagaaagaaagggggcactggtgctgcctccctcctctattagtaaatgacaatttgcattttatctcagaggcatttgggcacagaaaagttatagctcctaacttcctgtgagctagtgaaaatacaggttcctgtgtcccattcccagagattctgctttaattgatttgccatggggcccaggaatgtgcagtttgaataagcatcctgagggttccgaagcacatggtctggcacatgctttcgtataaatcctggcttgaagcctcagtgagtcagcagtccaacccaaaggctgtgttatctcctgccatctcctgtgacctaccttttggcctccagtttggagggcctctcttgtcccctctaattcttcccttagccctcaaattgcattgtaaatgttttcaccccagtacctgtgctgtgggtgaacagctagccaggaaaaggagaaaggtctgaaggagatggactcagtgcatccagtagagtaataactcaacttggagcttggctataaagcgggagggcctggtttttgtttttttgttttgtcagtctggctgctttattctttctacgtttttattttggagaatgggtttgatttgttaattttattctaaacatttgatttttcctgaagcttaggtgggtggtaagggccatctggttttactaggtcgctactaggagggggtcttgctgagcagtcccgatccagggtctcctactgactagcctgtactgagcatttgctctgtgcctggctctgtgccgagtgctttatccacaccagctcctttcatatttgcaagaacccagtaaagggaagagggtcttgttgtcaccagtatgaagtgcagaaactgaagtgatcttggaagctttggttggatggatgggcagagggcaggggtatatgggtgttctttaagagtggcatgggagagctttggtcattggagaggccaggttgcttttaagttgtgtcttcttccaaggcacttctctcccagactgtctcttgtgtgggttgtcatgaacccaaagtatccttgctgtttattcctgaagcttagtgatctgaaattggccaactttggaggccaactaatagatgtttaaccttgtcttttcctaaggaggcactcaaggtgtacccaaagttgactgacactgatcttctggaagcctcaaggctgattcttttgctgcctcccatttgtctcctttggtttctgttcttgcgtctttccctacaaactgaaactagaattctgtagcagtgtcggagcggaaatgcttttctaaaacaagctcaggaagtcatttaattagcccaggaagggaataggggaaaatctattctctccaaataatcttggaaaattggagttttcctaacacattaagagtaaatgtcctgcctcactgcagagtgatctgtacatcttcagttgacaagcatgaacatcccccacctcttagtcccatgattccttctctcttccttcctgctattgactactgtgcagactcagctggattttagataatctttataatatcacaatggtttccatggagatggatcatgatgtcacaaaagtagatatatattctttggatactgaaaaatcaaagggcaatagagggaggaagagaagaattttcaaactggtatatagaggagggggaaatctagagaacaggaaagaaaactaagaaagggtgtgagtgaaacagagaaatggctattcaaaggctattcaaaatgacagcaaccaaaaaaaaaaaaaaaaaaaaccccagaaaatttgcaaggaaattagaagcagggggtaaggatttgaaggaaagtaagatgatgacaagaagctggattgattgattgagacagggtcttgctctgtcgcccaggctggagtgcagtggtgcaatcacggctcactgcagcctcgacctgctgagcccaagcgatcctcccgcttcggcactccccctcctccaagtagctgggactacagacacgctccatcaaacctaggtagtttttgtatattttgtagagacaaggttttgccatgttgcccaggctgttcttaaactcctgggctaaagcaattcacctgcctcagcctcccaaggtactggcattacaggcgtgaaccaccaggcccagcctctagaagctggatatctttaaagagtagttcttagcagtcttccatgggcactgcactgagtacatagttgatactgggcaggtgggtgggtggatggatggaaggaaggaaggaaggaaggaaggatggaaggatggatacatgtatggatggaccaggacaactgttgccctctaacaagagtaggaatctgtcacttctttgtagtttaaaccaggagcttcagaaaatccgtgaaacccctaaaattgtacacaaaattttgtatgtctgtgtctgtttcctttttcattgtaaagaaagttcaggacagctttcatcagaaggcttatattccacaaaaggttcagaacctttggtttaaacttctagaatgatgtaacttaataagtgattgtactcattgtccaagcttccttcatacacacacacacacacacacacacacacacacacacaccccacacacacatctgccgcctgctctatctgtaatgccatctcttctcgctttctctccccttcctgtacagttcacccatctcaggagcctggctggttggaggggactctgaacggaaagactggcctcatccctgagaattacgtggagttcctctaaccgtgggccccagcagaactgctgagctttacatggtatccatgacaactgctgattccagtgtcgaggccatttctctttgccactgagaaatgcagcgtgactgactctgttgctacctgtcaacatgaatgtttctgtgagctctggtgtcactcatctccatgatcatctcagccaacatgcatcagtactgcaagaaaagaagtcaatcagcagaggagagcatttgataactaagaggaagacttgcaaagccgttttctcatgagtaccctgaatagggggcactcattttgtttcaacggtccaaacgcccaaccttcagaaagaggaagtcagatagaaatagtccctgagagcacactgtgtagctaagcctgctggggctgggtgaagaaattggcgctgagatccaggctggatccattgcttttgtttacaataggcactctctctaccccacctctcagtacttgagacttaaagtgctacaggcagctggatctgtttgcatgcaggatgaagagggttaaaacactgtttatataagatccaatctctcaccatctctaaagcagccgttggcctgtcatcagtgagatacaatccagtcttctcatgcacgggaacacacacaccctgcgtttctccctcccaggctaggaacctctctgccaccaagggctgccatccatcgcctagtaaccacggcaacccaacctactctaaaaccaaaccaaaaaaataaaataacacatcctctttgcatgacacattttttttctcccctttttggtacactttttttgaatggttttctaacaacttgaagcacaggatcaaggaattagggtggtctacttgaggcagatgggatagtagctgggaactgttccctttctgattaatttcagcagcatcggaatatatttggagcacaccctagtaacctcttgagattaaattacatagtcttaatatttctgttcctccatgcaactgatgtttgttttttaaagggtaagatgctgcctcccaatgggtgatgccatctgactggtttccccatgtcctcccattcacccatctctgctcccacccttgcctgcctctaacccaccactggccagcccccttgccctactctgggctgctgaacactggtgctgtggtggttttcaaggttaattcctaggctaaccgtatggcctatagtttaaaagcacatctatgttcactgccactctgaaaaagggaattatttctcagtctttcaaggcttgagactaatataggccattgtgattcaggaagaaacccaaggttggagggtgggatgagtaccctctgaaaaagggaatttgctggtgaaaagaggctggatcttgtggaagactgtcttggatggggaagtactacctggagatttcaaattcacttggcctgcaaacaacagagttatccgtatcttccacatgtgaatgtcattgcaagggtgactctagacaaactacaaaccgatggaccgtcaagctccccaggagccccttggatggcagcgttgcttcagagtgtttcctgtttctggaattccttgttagggaactttaaagaagaaaagaaaaacttgaattgtgttgaattactgtatcttttacttttttttttttgaaaagataaacttgtaaatagagtgatttgaaatactatatggcaaagttttatatttgatattctttaagttagttgctcacacacttaggctttgattgctgaagaagtatgtttaagagggagagaggggaggcaaagctgaagagagtcaaggtcactgtccccgcttcggcctgaaggaaagagaagacatttctatggccttgctctctgctgtcctgttggtgggcacgacacatcagtggtgttcagtctttatgtgtttttaagcatcccttgggctttggatttggagatgggaagagcatctccaggcaatgagtttttcaaagaatgcctacttagtagtaagatgaagctcaggatttaaataagtggggtcaggcattcgagtttttgtctttcttctcaggtgtatttcttggtacccccaagatatcaggccagaaagagatgagtcagttgctgtgctctttacttctttttctccacatcttctgaggctttagaaatgtggacaagctagttttcaaattttgtgtgcgtctgtaagttcttaaagaaccagcttcttagaatgttcagttctcaatgtgctgctgctttcccttctcctaaacattttaaaactcttccctttcacctccaattcccgtgatcccaaaagaagaggaagactccaggaggggtatagattgtgccgtcatagctttacaggtggttttaaagttaacaggggtttgtcatggtgattcactactcagtttatcagctcaaggattatacagctcttttccgggaactcacccaggagcaagcgagacactaccattgaatcagggaatgagaattaagaatggacaggaccaagacagaactcaagaaagccactggggaaaactcgagaagaaagggagtatactagtaggttagatctgtgaacctgaggacaagaagaccttgggaaatggaggcctcaggggatgtgcattcacatactattacgcttctcaaagagagaccaacatcatgcttttaacacatttgatgaggttttttatttgtgtttttgtttgttttttgagatggagtctcactctgtggcccaggctggagtgcagtggcgcaatcttggctcactgcaacctccacctcccaggttcaagtgattctcctgtctcagcctcccaagtagctgggactacaggcatgagccatcacacccagctagttttttgtatttttagtaaagatggggttttgccatgtttgccaggctgatctcgaactcctgacctcaagtgatctgcccacttcagacccccaaagtgctgggattccaggtgtgagccgctgcggccgaccacatttgatgtttgaagttgtaatctgtcccatcataaacttacctggagctcatgtggaggaacagaaggccaagatccttgctttgggggtgcctcacgaagcatccctgtagacatttggccccagcttcactgcttggaagcatgtccctccctcttgagttggctctgatttgaaatcgggagaaacagagctgctgccaatgggatcttttaggtaactccctccctagcttccgtgtgtctgtgcagtgcccatgagctgctgccaatgggatctttcaggtaccccctccccagcttccctgtggctgtgcggtgcccttgacagatggcttctctgtttccctttgcccagccaggctcccctccttcctattagctacaaaactggataaacttcagaatatgagccaatgagtaggaaggaacttgaagactaaagattttactctctcccctatccatgccccctacctctgactctctctgtgtgaacaggaaactttagggcagatgaggagaatgaattggttatcagagtggaagaccatggcccaggatccctgagctttcccagtagcctccagtttcctttgtaagacccagggatcacttagccatagcctgaatcttttaggggtattaaggtcagcctctcactcttccttcaggttactaacaaaatttcgtagctaaagaatgccatggccgggtgcagtggctcacgcctataatcccagcactttgggaggccgaggcgggcggatcacgaggtcaggagattgagaccatcctggctacgacggtgaaaccccgtctctactaaaaatacaaaaaattagccgggtgtggtggcgggcgcctgtagtcccagctactctggaggctgaggcaggagaatggcatgaacccaggaggcagagattgcagtgagccaagatcacgcccctgcactccagcctgggtgacagagccagactccgtctcaaaggaaaaaaaaaaaaaaaaaaaaagaatgccatgccaggagaagacagctggtttcaaatccctgcccccaggcaagtaaaaccctgacttgctcaagacagaagatcttttctcctgtttttcaaaataaacatatatagggatggaccctgtgcattgtggcctgccttggtgtcctagaattggagccagtctttagcttaatgtctgaagtatttatacggccaatatgtgttttcttatgtcagaccacactgtctttttgaatatcagttcatttcctctcaccgagtgcttttcggtgagaggcaaagagaaagaatgaacaatcaagtattgacagactggcattagcaggacagagccatactagtgacaagggcatcccaaggcacttgcccagagctgcagagttgtgtgtgccatacctgcggctcaaagggaaggccttctatcccctgagtttctatcagctgaaaatggcaactgctgtctcagtaaaagctctgtcttgactgcagaggctccaaaagcattcacagttgagggggagaaagacagaaagaagaagccaaagataacctgatccctgcctgtctgttggcacctgtcatcctctggcttctgctcccaaaagcaagtctggatgactgagttttgtggacatggcactcccggagacagcagtggccaccatggcacccagagtttgcccaagtactgaatgttttgtgagcaaccatgttccccaagtaggtagccagcgctgcagaaaccaaacagcctcttagctacctgactttaaaaggaatgacctaggtgttctgccaaaggagttatctatcatctctggcaaacttgacaatcatcacttacctcgacaaccctgccccacatcactttataaagtcagcaggatgtcttctcacccaccctgtgctggtgtctaacaaatttatcttgtcatgctcaaatgtgtttggcagccacaccgatcggctgggtgctgaaccgcctctctgtaattgtagcatcaaaatgacaacagcagcagagcagcgaatcttgcacagccccacagcatgcctgagacaagactccaacaagtaataattagctttttttctcctgccgcctacagtacctgtctaactaaagagcttcccaaagtggagggaaaggccatagaatccaggtgtcattcagagccagtccttgctgaaatgtggtcttccagtggaagcacctgtattattgagaggaaaaagtgttggatgcaaagtaacaccaggactagagagaaagagaaaggtgaaccatcctaaggagctttggatacttttttagaaggataaatattatgcttactgaggagaaaaaaaaaagcgatcacagaaaaatttcacagctaatatttttacaaaagttgtgccagacattacagagtgaaaacgtctctcaaggtggaatgctttagagagcaaaggcttagcatagacctagacccttgtgtgggtatgacatgacatgacatgtccatgtcaaaattcactttagtcagaaccagagtattgataaacaaaatgtcagttacctggagcagtcctggagaggttaagacattctatactgttctacgtcaaccatttctacaaagttgtccagacacctaaaagcagctttcttggttatccagatgccagaatcaaccttgtatctgacaatgcacatctgttgattctaaagtatatttatgtgtgtgtgtatgtgtgtgtatacagcacatatttacatctatgaagacatagacacttacagagacccacatgagctggcactttctgagcctttacagcctttaagactcggaggttgagaattagagacacaagagaggctgtggatggcctattaaaatgattaaagatgtaaattcagtgccattttaaaactgttcatatttatcaaacaattactgtctacagctacattttttgttaacttacttaaagtcatgtcgcaagaaagatcaaacccatgaatgcttagtagctaaggctagtgttcaaaagcactctaaaagacattttgtccacattttggaaaagaaaatatttgcatgtttaattcataatttaggctatctttgagtatactgtaaagtgctgtgtgatataatatcaataaagtacttattaaatggcactttaatgttttcttttaaaataacgcactgttctaaacttcagtattgactattgactcgtgcatagaatccaatgctgtaattagaaagtaatctgtgactagaatagacctttgtccctgttagtagccctgttgccatgttcaggcttttaaaaaatgcttttgtgtcaccaaatatatctataaagaaaacaaaatttctgttcagaggcctctgaaacttggctttcttacatgtggttggtttatgtgacaatccctatgaaatgagtggacgtatgatttttgaattaaatgacttttccatttggtggtattttcttgagtttctgatagagtttgactcaatacatgctttaatatgtcttcaaataagcatatatacatgatgatcaaaggtcacaagtctcggctcctgcggtttttggtgacaaccaccgtgcttatttctgatgagctctgagaagctttgctttccatttaggaagaggtcagatgctaggaaacttgagaatttgctcctcaggcatattaaacaattgagcccgaagagtcatagtccacttcacatttctaacgttcttctcttagaatacatattgttttattcttcctaaatttgactttctaatcacctattttctgaaacctcatgaacacaaggatggaatcatcagagccagaacacaggcaatgcccccagcacagctggtttgtaagtctgttgtttagagcttgttgcatgctgtcccaggccaagccagatcactgagtcttcgcattcatcatgtcccttccagatacattctgagtggcagcctgggacccaggcttccagtgagctcccagcttctgccacaagcacagaggactccctgatgggctcagtggaggcggcatggggaagccagcgctctggggactgaggatgaggcttctggcttcagatgcttgccctgggaggggaggaagggatgtgaagctcccttggtcctggttctaaggggaggggggctatttaaatgcgtgggtcacatgtgagctgtctgcttgtcctcatttgccacttcgggcactcgtttacccctgtgaacagcacaggctggcagcagctgctgccctcactgagttgacagcctcctctggaaaactcccccagcacccaaagcgtcccacatgtgtgggtcatcctgtaactaggcgaggctttctgagtatggtgtacatctatgtctgatccttcatggagagaatgaaatacgtggtgtgtattttatctttgtccttggcctttccaatagatttcccaatcacttcaactttcatgccttcctagcagaaggttttaattttgttttgcttttaacagccactcagagcagagcgcaaactgtcacgtcctgtggttttgcttggtgtttttcactcagttctgactgcatgattagtcctaagagcacctgggttagaagtggatttgattgacagttgaaattaggtaaatgttagagagtgagtgtgatgagagattttctcagaccccaaacacgcttgctcatgagaattaagtcatggctctaatttcttattttctcagttctttcccaacctccactcagataccacacttctctcctacctgaatgtgtcagtgtcattggcttgccctgcttttaatagcaccaagctaagctgccactaattaactatgcggggttagtcagtgttggctgactgcagcctgcacagcagccaagggaggctctaacctccatggtaactgctcggggtgggtgaggtttgtcacatggaggag

SEQ ID NO: 38 - DNA, 35337 bp, Homo sapiens
  source 1..35337: mol_type = genomic DNA
aatgtttttatcgtgacttttacaaatcaagctggttataaagtcattctgtcattctcaaagatattaagttacccacagataaattaaataaaaatctcccaatgcctctacggatctaaccactccaaggaaactagcatgttaagcattttatctaagatatgaaaaaaaaaacttttttggaaaccagctatctcctgttcattacctcactattgagtcatgcttcctttaacaaatccagaccttacgctttctatcctgtcttttacactagtctttctgaagccattaaaactctcccatgttaaagcaaaaatctaggatgtccaggtttacttccccatcaccttttctcaagctgaagacttttggattcagtatccaagaagggactcgagttggggagaggaagagaggagcaagtaagtaggaaaggaagggcagtctgtactgttaatgtctcttccccctcccctttatgggagcctttgtacaggaaaagctgagaaagtgatccacggttccaaacaaaatgctctatgcttacgaggaccacgtgtaacacaggggtttagtgttccattttattttttgttgttgtttgtgtgtgtgtgtgtttgagacagtcttgctctgtcgcccaggctggagtgaaatggcgcaatctcagttcactgcaacctccgccgcccaggttcaagttattcttctgcctcagcctcccaagtagcttacaggcgcccactagcgcatccggctaatttttgttttttgtgtttttttttaagtagagacggggtttcaccatgttggccaggctggtctcaaactcctgacctcgagtgatctgcctgcctcggcctcccaaagtgctgggatctggccaagatggtgaaaccccgtctctactaaaaatacaaaaatgagtcgggcgtggtggcaggcgcctgtaatcccagctacttgggaggctgaggcagagaatcgcttaaacctgggaggcagaggttgcagtgagctgagatcgtgccactgcactccagcctgggtgacagagcgagactccatctcaaaaagaatagtggtgatcaatctatattgtacaagagcccttgggaattacatttttaaaaaagacacaaggtggaccctcatgcccctcatcaacgaaacagaactgggtacattcccaggtgaggcccacgtgcagccatgattttaccttggaatcccattcagccttgaagtttgggaggaatgaattccacttgtagctccaggagagatttatgattaaatttacagtgtttagcgcatctccctggccaaggagacttaaggagacactggctgagggtttctggaaaattttattcattcttctgtaaaaactgcagccaggactacctctggttaatcccatcagtttggacgggttacctttcactagcaacattaaagaccccaaattagaaagcaacacataggcatggtgaagtcaagaaaagggtggacttgaatgtttatttacaggatgctgcaagataggaaattccacatagaaattagaaacctagtcagaggacaagcttcatacagtatgtacagttggaactgttcaagtatagtttcagtgtaaaaagtgctacaataacaaaccacatttaagaaagagttcttagtagagaaacaataagacaaaataccaaacatagtacacaacaaatttatgcctcagctacatgatctaaaagttaaaggtcccaggagccccatcctgaacttggaaagtgtagccttcagaggtagtttctggcacaacgttttgatcttcctcttcctggaaatatattaaaaaataagtataaaaataataagtattccaagcagcagcctacctgaagtctgtatttaatctctaggtcttgatctgcatattacacctttaatcctgtatggtattgtagtatctgacataggggagggagggtctctgaaactttgccaattcataagtgctagctactacagtaacagaaacaggccgagattttttttcttccccaaccgtcacttttcaataggaaaagactgtattaggcccagagcatggtggtgggtttggcctacttctctatcacctcctacaatgacacccgttaacttaccctcaagatattctaagattctcaaggctgttcatttgaaactaatctggtgacttttaaaatctcacctcaacgccaagaccaaggtgcgagggcttattgagatcatctccaatgcagcagggtacgagaatatccccatccagcaccatgaagaaaacttcctgaggcagttggctcagaaggtccctgacaagctgaataaccctaagttcaatgatccgcacatcaagaccaacctgctcctgcaggctcacctgtcccgcatgcagctgagtgctgagttgcagtcagatacggaggaaatccttagtaaggcagtccggctcgtccaggcctgcgtggatgtcctctccagcaatgggtggctcagctctgctctggcagctatggaattggcccagatggtcacccaagccatgtggtccaaggactcatacctgaagcagctgccacacttcatctctgagcatatcaaacgttgcacagacaagggagtgaagagtgttttcgacatcatggagatggaggatgaagaacggaacacaattcttcagctgactgacagccagattacagatgtggctcgcttttgtaactgctaccctaatatcgaactatcttaggaggtggtggataaggacagcatccgcagtggcgggccagcggtggtgctggtgcagctggagcgagaggaggaagtcacaggccctgtcattgcgcctctcttcccgcagaaacgtgaagagggctggtgggtggtgattggagacaccaagtccaatagcctcatctccatcaagaggctgatcctgcagcagaaggccaaggtgaagttggactttgtggctccagccactggtgcccacaactacactctatacttcatgagtgatgcttacatgggatgtgaccaggagtacaaattcagcatggatgtgaaagaagccgagacggacagtgattcagattgagtcctgaggcatttactcttgggtaaaggagagttgagcctgaattaggaatgtgtatattgtagggatcctggtggttatggggaccacgtctgtgggcctgaggtctggccagccagggctggtgctgtccctgcccacatccacttccttttcccttgttcacactctggatccagtgacagcaggtgtcacgggtcaagcataaatcatatatagcatgttcaggcatgttactggtagttccttttgagtctgacattctaataaaataatttgtagaaaccaaagctaaataaataaataaatagattttattaccatcaagccaaacatcagaggggcaataagtacattacgtcctatgcacactgatattttactatatttaacaaagatatgaggctcatttttaaaagtatgagggaaaaaagggctcatggccttggctttacatttttccaagttgttattaatattaccatccattactcacctctacagagaaatacttctcagttaagcttaatgaagccttatatacagactcattttcatggttttgtagagcttcaattttgtctacgcctccacattcttcaatcattatactaagtttctcagtttcacctagtttctcagcagcctaaaaaaaaaaaaaaaatccaagtttactggcgtatactctgaatgttttaatgaagaaaacatcgaaaatttgaatattgatatgtcaggcagaaataagcaccttaacagttccttcatcaagcctatcatagttttatgtccattctatattttgttgaaactcagtgtgattggatctgtacctactcttagcagtacttcgactggagccagagatcttacaatcagtagctctcaaccttttgtatgtatcaaaatcacatgggccacttttttttctttttttctgttttcttttttttttgagatggagtctcgctctgttgcccaggctggagtgcaatggcgtgaagtcggctcactgcaagctccgcctcccgggttcatgccattctcctgcctcagcctcccaagtagctggatctataggcacgtgccaccacgcccggctaattttttgtatttttagtagagacggggtttcaccgtgttagccaggatggtctcgatctcctgacctcgtgatccgcctgcctcagcctcccaaagtgctgggattacaggcatgagccaccgcgcctggccaacgtgggcaacttttaaaacaacactacactccagttcaactggtctgctatgggaacaggggcgtattgtttcgtaaagcatcctatatcatcacaaggtgtagtcaaggtgtctaagggcaaagatggcctatggagtgctaaactaaatgtctccgaacagaatgtgtgttggtattaaggatttacggggcacatggaatggtatgtaggttagtttttctttaaattttcaacttttaagagatacataaatatctatagatgaaataacagatttgcttcaaaataacttaggggattagatgaaggaaagaagaaatactggccacatactgacaaattatttatacacagtgacagatacaccagcatccattattgtaggctcaattttttttttttttttgagacagtttcactcttgtcacccaggctggagtgcaatggcgtgatcttggctcactgcaacctccgcctcccaggttcaagcaattctcctgcctcagcctcctgagtagctggaattacaggcgcctgccaccacgcccagctaatttttttaatttttagtagagacgggggtctcattatgttggccaggctggtcttgaactcctgacctcatgatccacccgcctcggcctcctcaaagtgctgggattacaggcgtgagccaacatgcccagcctgtaggctcaacttctatatgtaaaaatttctagaatccaaagttgatgagaagggcttacctaccaccaatcactacggcaaagtgccatatgctggtatgcttggatcagttaggggtggaaccagaagaaaaatataattaagtcattcaaaaaaaatttttttttgagacagagtttcactctttcgcccaggctggagtgaagtgacgcaatcttggctcactgcaacctctgccccccacccagagttcaagcgattctcctgcctcagcctcccaagtagctgggattataggcgtctgccaccaggcctggctaatttttgtatttttagtagagatagggtttcaccatgttggccaggctggtctcgaactcctgacctcaggtggtccactcacctcagcctcccaaagtgctaggattacaggcatgagccactgtgcccggccaagtcattcaaatttaatgtcaccaaaattcggtatgaaattgggaaattaaatcaaccaagtaaacaggtgtgatgagtccacataagcgcctgactccgattcagttcgcaccatccacttgtcatctcttttatatcttttataatgcctgccacatttttaatcaaaggggtggccacataaacaggctttctgattctgtggcttactagtgagtaaacttacagctgccctcccccaagtctaaatagtaaaccaattattatcaagtccaaattcaaacaaagccaccttgataggacttacctgaaagatatttgaaatggcatccaggataaccagaataatcttggtatcttttgcaggtaagaggttcatcaacggttctattatgccacagtgaacaaggtacacaatctgttcaactgttccacggcccatacagcttccttttgtgtctcaaaatctgccaattaaacataaggaaatggttttatttcagaacagttgcacaaataagattccaagagtactttttcacaaaaacggtgactgaaagtaccaaggttctattgatacaaccttaagtaaaggggttactgggtattgttcagcaaaggactcctagtagaacccaagattcttgcacatgaagaagcttatcaagcacagctttctataaatactaaaaatgacttgattaaatcctaagacttcgttaccttagagagatcgctgacaaggaatgggactaatccatgattcacaacttgctgtatctggtcctggcggctggctgtgatgtttgacattgtccacgtagcttccttctgaatgttagttttggggttggtgagcaggctgggaaagacggcgagtgctcctgcatcaatcacaacctgagtctgttcatctgtaccagtgacgatattccctatggctcttagggcaggagtctgaaaaggaaaaaatgttgatgctggttaccttatatttttctcagcacttcagaaattctgtactccaaaagttttaacaagaggcccaacatgacctgaaataggcaatatttcaatattggtatcaactgattatgcttttttttttgagacaggagtcttgctcttgtcacccaggctggagtgcaatggcgtgatcttgggtcactgcaacctccgcctcccaggttcaagcaattctcctgcctcggcttcccgagtagctgggattaaagcgtgtgccaccatgtccggctaatttctttgtatttttagtagagatgggttttcacatgttggccaggctggtctcgaactccttacctcagctgatccacccgcctcggcctcccaaagtgctgggattacaggcatgagctactaaaaatttagacctacatttaattttgcctgttaaacattcattattttatatgtagaacagtttccaaactcgatgtcaggactcactggagtctcaagttatggagtatccaagtgtttcgttgctaaaaaaggcagctttgaataatttaaaaaatgaactagaaggccaggcacagtggctcacacctgtaatcctagcactttgggaggctcaggagggaggatgggttgagctcaggagttcgagaccagtctgagcaacataatgagacctccccttctacaaaaaattaaaacaaaacaaaacaaaaatccaggcatggtggtgtgtgcctatcaccatgcaagaccttctctcaaaaaaaaaagaatcagagcagactgaagattattcctacattaatctcaataacttgcattcagatatactttgagggagaaagacatgaagttataagcaacattctgagaattttgatatctaattttataatctatatatttccatggttgagtgttgttgcaaatataaatgggttatgtgcggccaggtgcagtggctcacgcctgtaatcccagcactttgggaggccgaggcggtggatcacctgaggtcagacgttcgagaccagactgagaaacatggtgaaaccccatctctactaaaaatgcaaaaattagccagacgtggtggcgggcccctgtaatcccagctactcgggaggatgtggcaggagaatcgcttgaatccaggaggcagaggctgcagtgagcctagatcgcaccactgcactccagcctgggcaaaagagcaagacctgtgccctgcccccccaacaacaaaaaaatgttttatgttgtgaatcaaagtagaaaggaggtttgagagccaatgctacccataattcaaaaagccagtatccctgtctctccaggagcttgacacctaacagaaaatgtgacaagtagacaaacagcataaaacaagtggtaaatagatgggttacatagcatttactcccaattttgggtgcagaatcagggcgctagagaatcctgagaaaggagtgtctttcctacgaggctaaggagtgctataagaagaagatgagctttgagtattagtaccctagaaatagaacacacgtagtagtcaattggaaaaaaaaaaaagataaatgtggagtgctaaagggctaaaggaagcataacgtggctgggtgcagtggctcacacctgtaattgcagcactttgggaggccgaggcgggcagattacctgacgtcaggagtttgaaaccagactggccaacgtggtgaaaccctgtctctactaaaaaaaaacaaaaattagttgggcgtggtggcggcacctgtaatcccagctattcgggaggttgaggcacgagtatcacttgaatccaggaggcagaggttacagtgagccaagatggcgccattgcactccagccttggcaacagcacgagactttgtctcaaaaaaaaaaaggaagcatattgtgagaaaaagaagtaggaaagtgcccagttatctttggaagatgaaagataaatttgaaaatctaagataggtctactttgtggaaggccttcatggagtatggattatattattattttttagacagagttttgcacttgttgcccaggctggagtgcaatggtgcgatggtgcgatcttggctcactgcaacctctgcctcccaggttcaagcgattctcctgcctcagcttcccaagtagctgggattacaggcacccaccaccaccccgagctaatttttttttatgtttagtagagacaggtttcaccatgttggccaggctggtctcaaactcctgacctcagattatccacccacctcagcctcccaaagtgctgggattacaggcgcaagccaccgtgcctggccagagtatggatttttatttttagagacagggtcttactctgtcatccagcatggagtgcagtggtacaatcatagctcactgcagcctcaaaatcctgggctcaagtgatccttctgcctcagcctcctgaatacctaggactaaaggcctgtgccaccatgcccagctaactttttattttttgtagagacaaggtcttgctatgttgcctagtctgggctcaaactcctggcctccagtgatcctcctatttcagcttcccaaagtgctggaattataggcgtgaaccatcatgcccagcggagtatggattttttatttttattttttttcttgagacagagtttcactcttgctgcgcaggctagagtgtaatggcaaggtcttggctcactgcaacctctgcctcacaggttcatgcaatttggagtatggattttaaggagagaaaaaacacgtctaaagcagtactttaggaaaaaattcagaaaaatagcatttggcacagaaagaaggaaacgataaattaggaggctactgtaaatatttcaggaggaaagacctgaacaaagctggtgacaaatacaaaaaaacacagaataccaaaaaagacagaaataaaccaaatgggctgggtgtggtggctcatgcctgtaatcccagcactttgggaggcccaggtgggtggataacaaggtcaggagtacaagaccagcctggccaacatggcgaaaccctggctctactaaaaatacaaaaattaaccaagcgtggtggtctgtacctgtaatcccagctactcgggaggctgaggcaggagaattgcttgaaactaggaggcgaaggttgcagtgagctgagattgtaccactacactccagcctgggcgacagagcaagactccatgtgggaaaaagcaaaaagaaataaaccagaaactggttggctctggacacactggtcaggtcaaggtacccagctagtagctagaaatgcagggaagtctgaaggaaggtcagagttaaaggaagatcctaaatcagcttcagtggattatggaaggcaggaaagaagataattagtaattgcaaacagagaaaaagatcttcacagatagttaaaaccataagactagaaatgttaagtttacttgaatttctaagaaaagtccctactgattttctggatttcatgtaactcataatctaaaatatatttttttacctggttgttgcagttttcctgcagcggagaagtagcatcatcaggaaatgagcttacatttctcctcttcagcatctggtcatccttcttagctttcctcagctccacattgacctctattctgtgacgcctcgtttccttgagaaaagataacatgctgtttcacctaccacatcagtttttgttgctaagtgaggacatttttaaaaagatccctaagttttcatccctttccaaatgtcttcccatttaaataacaccataagaaagcaacagaaggtactcactgtactgtcctttcccttgttcttagatctgtgaagatgggcagcttgtgtattagcattctcattggtggacatggttatgagacaaagggagaaagctaaaagatgggggaagagaaaaatatttcctttatcgttttcctttgtcaataatagtaccaaataagaactgaattatcaagcatctactgaatccacacctgtgcactagagggatatcatcatgttttcagcactatggaatagttttagccaacggataactgtcccccttccatctgaagggctgagacttcctagagcagggctgtccatcagaaatagaatgcaagctatataaattgaaacttcctagtagtcatttttgttttgttttgttttgagatggagtctcactctatcgcccaggctggagagcagtggtgcaatctcagctcactgcaacttctgcatcccagattcaagtgattctcctccctcagcctcccaagtagctgggactacaggcgtgtgccaccatacctggctaagttttgtatttttagtagagatggggttgcgccatgttggccaggtcggtctcaaactcctgacctcaggtgatccacccacctcggcctcccaaagtgctgggattataggcgtgagccaccacatgcagccaaaaaaaattcaaaattaaaaaaacccaataaataataatgaacttagacaaaaataccttcttggcatctaatgagatgatcaaaaggtttcctttctttaacttttttctttttgagagtgtcttgcgctgttgcccaggctagagtgcagtggtgcgatctcagctcattgcaacctctgcctcctgggttcaagcgattctcctgcctcagcctcctagcagctaggactacaggcatgtaccactgtgccccactaatttttgtatttttagtagagatggggtttcaccatgttggccaagctggtcttaaactcctgggctcaagtgatccactcgccttggcctcccaaagtgctgggattacaggcatgagccaccacatccagcctttctttgacttcctaaaatagtatggtattagtaatctcctagtattggagattggtgtctaaggtgaagccaattcagccatggtttcttattctttaaatttactcctgaatagatctgcataccaatattttgagatttcttatagacacacctatttgctattaattattaataataaatattaataaaggagacagggccataatttttaatttgtctatttctatttatcaagttttctaacagtttcacactaacagaaacaataatctgtaaaatttcctcctttttctattctggcagaaaagtttaaatggaactatctggttcccaaaatttaagaaaaaccttatgaaatcatttggtcctgccatcaccttaatgacaggtgcagtgataaacaaccagaaatccttttcctgcctaagagtgtggcttctgacctattaaggactgagatgactgtggcatccttctcaacccttccccccacccaaagggagctcggtgggtccctttctgtggctgtggggatggaaggtggggcacgatgagttggggccttctattccaccatcttgctccactccttctaggtggacccctttcattgtagatgtaggaaacctgaatactatgttagtagaccctgtgaaggctttaaaattccaagttctagtaaaagagaatcagaaatgttggttagtatgtctctttttttattcttgatattggttatttgtgctgtattatttcccccccttgataatcttatcagaggcttgtaaaacataatgggatctaaagtatgtttgttttctatttcatcacatttggtcatctttaatattttctttctttaggctggctccttgagatgtacccctagctaattaatttgcagtttttcttttctaacataagcattaaaggctagcaacttctcctaggaagtctttaactgcatctcacaaatttcaatatatgtagtactttcatgaacatccagatcaaaatgttttctggttttcattatgatttacatttgagcacttcttatttatttagaagtgtatttcttatgtttcaagcatatagcccttgcatttctttaaaattttacaaatgtctgtatccctaaacaatactgtaacattgtgttatcacacatgcttttaaacgctacacaaatgtatgtagtatatacatttatccttatgtatttttagtgatggaactgttttcttttttttttaatttttattttattttagattcaaggggtctatgtgcactgggggaaccgggtttctagttactcattacccgtagagtaaacactgtacccaacaggtaatttttcaacccttatgcccctcccagcctctccaaatgttttccttctattgtaaacttacgagattcaatctcgacacttgttgctctagtgtgtttttcactgctatgtaacagtccattatgaaatgatgacacaatttaaacatgcctgattatgagtacttaggaattgtttccaaatttcaccattatgaaataatattataaggaataccctgttacaatgtcttctcatgtacacagggtaaaagtttctctaccatatcgagaaggagtcaaattgcatttttaactttggttttgtcaaaccattctctaaaatgttatagcaaccattgtactaattgctctcgtatcagaaatgtatcacaactataatcccaacactttggtaggctgaggcaggcaggtcgcttgagcctagagtttgagaacagcctgggcaacataatgagacaccgtgtctacaaaaaatacaaaaactagccaggcatagtggaatgcgtctgtagtcccaactactcgggaggcagaggtgagagaataaccttagcccagggaggtcagggctgcagtgagctgtgatggcactactgcattccagcctgggttgacggacaaaaaattagccgggcgtagtggtgggcacctgtaatcctagctacttcggaggctgaggcaggagaatcatttgaacccaggaggcagaggttgcagtgagccgagattgtgccactgcacaccagcccgggcaacagtgcaagactccgtctcaaaaaaaaaaaaagaaagaaagaaagaactaataatattcattcatgtttacaacttatataggaagaaactgagccaaaagtaaagtctttaatatggcctcttaaatacattaactttcatgattaataggctagtatttcaaaagcgagtccaatattcatcatttacaaggctcagaattcacttacctggtatgtcctaaagattctcgccatattggtagcatcacaactggtttaactgcacactccaaaatggctaaagccaatgcaaattctctgagtttgctacacatctgaactgccttgatccagtttgccctgtatttcagaagaaatgaaagaaattatttcactaggttgatctaaattaaaagcataatagttgtaactttggtctccatctgattccaggaataaagattctgactcctaggaatcctccaaatagttagtggtgtcagttcagtaagttagaagtacactcatgcctctaacgtcctgtctgctgaccacattgacttcattcaactcattggtaatgacgttttcaagtgcacaactacaacaatcattttataaacatttagtatatttacagcaataaattaaccttagtttcctttacctatgtgatgcccggttgggatgaagaaaggatgaagggatgttgttttctaattgggtgatagtcagtctcagagtagatatggtaagaactttggacccatggacagaaccgttccatttgaactctcctgctggagtcagacagaacttatgtgcaagatgccttctcttatcatggtcttctctgtgctggtgcttattcaaagcaaatgaattagtggagtattgattgtggtagacgcgatacttcccttcttgacccaatttaagataattgttgatacttcctttcatgaccactttcttttcggtgctcaaccgtgaaatttctccttgagagttaactaccagtacctgaccaaaaaaataaaaagactgcattatttatgtcagccaaagatgtaaattgtatccaatcaactgtctttcaataattaaaattaatcactcaaagtaagttaagataaatcttatgatagaacttttgaagtctaaaagctaagttaaaagtaaagctaattgtttacaattaaacaaccaagatatgcctgcagaaagaaaactaacacatattaagtacctattacgtgtcagatactattattcactgctttcatgtattaatatttcaaatatacacatgaaaccatacatataaattactcacctaccattttttcaagtttataacaagcttttcaagtttatacctaagggaaaaagaagggcatcacaggtattctcccccccaaaatatattcctaaaaacgctcttttgggtccttttatcattccagctatagtgtaagacctcatggatacttcaaaatagtattttcaaacagttgatcccaactctttagtgactatgaaataaatagtgggtcttattcagctttttaaaaaataaaatgtaacgcagccaggcacagtggctcatgcctgtaatcccagcactttgggaggccaaggcagacagatcatgaggtcagtagattgagaccaccctggccaaggtagtgagacctcatctctactaaaaatacaaaaaaaattagctgggcatggtggcgtgtgcctgtagtcccagctactcgggaggctaaggcaggagaatcacttgaacgagggaggcggaggttgtggtgaaccgagatcgcaccactgcactctagcctggcaacagacagagactccgtctcaaaaaaaaaggtaatgcaataggctagcacagaaaatatcagagtgcttcccacataataaggtaaaacagtctttcagaaagcttttgaatatgtatactgggctgctatgaaaaaatgtgtatttgactgagggtcagagtcaaaaagaagtatgaaagccactacttttaagcaatcgctgtgatgttaagaacatcatttattcgtacatatttacactgcaaataattcttgaatctgggagacacagttggggccacgtcctgtcaccatggctagctgaagggcagagatactgagtcctagctctgatcccatgatctgattcacgatcagagctgggacgccatgctgtcctatctacagtgttctgctatcaatgggtaagcctcgtcctttagctgcaggttcacccggagtgatcatagctagaactgagcagtgaatcatcgataattctttaataaaccataaaacccaaaatagcctactcatatgtgtaaagaaggctttaattctttagaattgtatgtagaataaaactggtcatgtagtaagaaagtgtatcagccatttatagcatttatatgcctcgactgaaatttgggtatgcaactatgcttagaaagcctaatgtttttaatcttgttacctactacagctttggaaatagagaaaatacaattcaaaaataggtctacaaatttctacagattatatatatatataaaatatatatatataaaattatatatatatataaaatatatatataattatatatatataaaatatatatatataattatatatatatataaaatatatatataaaattatatatatatatattatatatataaaattagccgggcgtggtggcgggtacctgtagtcccatctgcttgggaggctgaggcaggagaaccacttgaaccctggaggcagaggttgcagtgtgcggagatcacaccattgctctccggtctgggcaaaagagagagactccatcacaaaaaaaaataaaataaaataaaataaagtttgttccctggatccagcatccccttttaacaactaaatcctttttcccttcctccttttcgagccaacttctctgtcccctcacttagacaaccagctcactgctcagaggccttccaccacttccttgatgacagacctggtccttgttaagcatgtccgtgtgaagagaccaccaaacaggctttgtgtgagcaacaaggctgtttatttacatccgggtgcggatgggctgagtccaaaaagagagacagcgaagggggatagaataggggcagctttacaggacttgggtaggcagtggaaaggtacaagttaaaggtggttatctattgatagcaggggaggggtcacaaggtgctcagtggggagctcctgagactcactgtccaggaggagattgtcacaaggtcaattgatgagttggggcagggacaatgcaaggagctggctgttttactcctttttgtgggtttttttttttttttttttttggctgctccagactttgtggctcctgcaggccatttggatgtatacgggcaggtcacaggggttacaaggaccttgctccggcttagaggcctgacaatcttcctctggcctgacttctgtccagtgtttgctctttaaaatcctctccttcttgggctttctcgggccaggcctcctggttttccttctttttctctgctactgctcagcagttgggccccaggctccatctcctccgccacggcctcatgcttggtgtctcacctgtcttctcactccaccgccttgggagagcccagccccactggctgtagatcaacaactcgcagcacagtctccaggctcacatagcccactgccatctggatgtcctttgtacatgttgaaagctgtgtgccccaaatcaaatttgtcctctccctcctccctccccattctcagcatctgagtgacatctacttctgtcacccaaggtagaatcatccttgcctcctgctggctttgcctcatctgtcactgagccctgttgatctcaccagcctaaaccttgcagacctgcctaccagttctcacgtaacaccagggttagaagaacatgaaaacactgctgcaaggaagcaaacaaacaccttgcaggcaggcaatgagtcaatgtccaggcagaaggaaagggcggggctcttcaagggagattgaagagacagccagatacaaggcatgaccttgcatgggatcctgaaccaaacaaaccagctgtgagagagatgttttaggataaggtggaaatctgacgatggcttaggtcatagatgacattaaggaactattgttaattttgtcagacataataatggagggtgttcatggagaaagacatcacttttcagagatgcatgctgaagttttcggggtgaaatatgatgcctagaatttataattcatcagcaataaataaataaataaataaatataaataaacatggcaaatattgttttttctcttttctctttttttttttcctagtagagcagccagcaaggagcaagtattgttaaatctaggcaataggtaattgtattcgtttttcaaaaatattatttttggctcagtgtggtggctcatgcctgtaatcccagcactttgggaggccgaggcaggcggatcacctgaggtcaagagttcgagaccagcctggccaacacggcaaaacccctcctctactaaaaatacaaaaattagcggggcatggtggcatatgcctgtaatcccagctactcgggaggctgaggcaggagtatcacttgagcccgggaggcagaggttgcagtaagacgagatcatgccattgcactccagcctgggtgacagagcaagacttggtctcaaaaaaaaaaaaaaaattctttttggccgggcatggtggctcacacctgtaatcccagcaccttgggaggcagaggtaggtggatctcttgagatcaggagttcaagaccagcctggccaacatggtaaaaccctatctctactaaaaatacaaaaattagccaggcatgtgcctgtaattccagctactcaggaggctgagacatgagaatcacttgaacctggaaggtagagactgcggtgagctgagattgtgccacagccctccagcctggtgacagagcaagattctgtctcaaaaataaaaaaattatttttacttttctgcatgttggacattttcttaagttttaaatttatttacttatttttaatatagaggtagggtttcactgtgttgttcaggctggtctcaaactcctgagttcaaacaatcctcccgctttggcctcccaaagtgctaggattacaggggtgagccaccaggcccagcctaattggacattttcataataaaaataaaattaaaaaaaaaattcctcaaacatttttactattctccatcctcactgtcactaccatataagcctgtgctctcggctacttggaaggacgaggtgggaggattgcttgagcccaggaggttgaggctgcagtgagccgtgattgcaccactgcactccagcctgggtgaaagagcaagaccttgtctcaaaaaagaaaataagaaaaagttgttcattatttctcacctggaaacagacttgctcttccagcaatccctgcccccgatgtattacagacgaagtagttcctctccctttcagacacagctctggagccaggattctgggaataaggccacttaaacacgccctgtttcccctctgctcccaactgtgacctgctactactgcctgagtcaagcagaggctggggcagtgggtgggtgggacctggctgccacaggtgagaggctatgtctgaggtggaggctcccaggggaaccctggggcaggctggcccatcatgggaccccagggagaaggcagtgtggcttttgtatccttgtgcccaggagctgaggggggccaaacaggtgggccaggtagtctctacccataaggccagggcaccaaggagacagagagaattcctgctggtgttttgacatcacggatgtccaacacccacaggctcactggcagagaccaccatcccttctccactctagggccacccctccaagtggggtactcctgcagcttgactccagctctgaggagcaaactcactctgtgacagctcagcaggggcaacagagagaaccaccaaaccagctgctgccaccagaccccagcacagccgggacccaggacgcactaaaccagccgccgctactagactccagcacagttgggacccaggacacactaaaccagccgtcgctaccagactccagcaaagttaggacccaggacacactaaaccagccgctgctaacagaccccagcacagccaggacccaggacacactaaaccagccgctgctaccagaccccagcacagccgggacccaggacgcactaaagatgccatcacaggtcatggggaaagacagacttgtcagtgaaaggtcacaggacaactgggacaacttagcccatccagagataaacaaataaacatgtatataaataagggagggtccacatctcattctgtccatccacattaaccttcaaaggattaaagatttacatttttaaaaatgaagccataaaaataatcaaaaaagaaaacaaaatccaatatgctgtatgtacatatatataaaagcccatatattttatatatatgtctctttatatatataaaagacttcaatatgctgtatgtatatatataaatatatattatatataatatgctgtatgtgtgtgtatatatggcttcaatatgttgtgtctgtgtgtgtatacatatatgtatatatataaatataagactttgtaacaaagactcaaaatataaaagccataaaataaacgagtgatacatttgactacataaatgtgttttaagaaaacttgtgtggcaaaataatgctattagcagagtcaaaagacaagctcagggtggcggagggaattacaactcaggtaataatagacaaagggctattttctctagtatagaaaaagctactagaactcaataagaaaaaaacctaacaacccaatacacaaacaggcaaaggatataaacagaccactcacagaaaaaaaaaaaaaagtggagggggacaaacagcccttaaatatatgaaaagatactctttctggaaagaaaaatgcaaatttaaagtaccttaagataagacatattatggtcagattggcagaaaaggaaagtttgacaacagttagttggcaaggctgtggggaataagacaccctcatttgtgttggtgaggtcaaattggtatatgcctcatgggatatacccatcaagtatctattatttaccttttgaccccaaaatcccatttttggaatttttccaacatctacctatacatatataaaagagtattcattatggcattgttgtaatagcaaaaaatgggaaacattccgagtgcccgtcaacaggagactggtaaaatggattatttgtagttgtagggaaagagatagaaactctctaggtataatctccaagatacattgtcaaaggaataaataaaagtaaacaagcttgtttttttaaaaaaaatcttgttttacacacaagatggtgtgtacaaggtactacctttgcttaagagagagagaaaattaagtaatcagatatgtagttatactagtttgtacttagaaactctggaagaatgaagaaagaatgaacgaaaggggtgacttttgagttgatggagaacagagcagggaaacagggtacatgtgagatttttactatagattttaaaatattgctttgattaaaaaaacctgtaaatacattacctagtaaaataaattcaaggctattggcaaaatagagggcctggagaatgcaattacaacttgaatacaaactcttaaggagactcgaatcaagcagaatttttaaaaaggactgatttttagaacttaaaatatgtcattgtattagttgaaggggaataaattcactcttgagattcaaatttgcagcctggaaggtcaaaaagaaatatcaaatttcagagcaaaagtacaccaagattgaaataaagatgccaaagataaactgcaggggacccagtcaggagcactcacatgcaaaggaaagaaaaggtaaaagaaacaataatcaagcaacaggccgggcgcagtggctcatgcctgtaatcccagaactttgggaggctgaggcaggcggatcgcttgagcccagaaatttaagatcagcctaggcaacatggcgaaactttgtctctccaaaaaatacaaaaaaagttagctgggcctggtggcgtgtgcctgtatttccagcttctcaggaggctgaggtgggaggatcacttgaactcagaaggtggaggctgcagtgagccgtgattgtgccacagcactccagcctgggtggcagaataagaccctgtctcaataaataaacaaactaacaataatcaaatcaagcaacaaatagatgttcctaagctgaaaaaagaccagaacctacagagtgacaggttctgtgagctccagatgagggtgctgcgaaaagaatccccatcgaggcatgtgctaaagaatatgtgtttgattaggaaccccagagaagggacagctgccaataatgaaatggaaagtgcaacaggggaagaaaaaggaaatcgataaccagatcagagggaagaaaaacacaagataaaccaataaatgtaaaataagccaaaggtaattaagtacagtagatcaattgttaaatgaaacatgaacagagtgaattctcccaccaaaagacgagtcatcttgggtttaaaaatacagtgataggctgggcacagtggctcacacctgtaatcccagtactttgggagggtgaggcaggtggatcgcttgaggtcaggagtttgagaccagcctgaccaatgtggtgaaaccctgtctctactaaaaatacaaaaattagttgggcgtggtggcatgtgcctgtaatcccagttaatcaggaggttgaggcaggagaatcacttgaacctgggaggcggaggttgcagtgagccgatatcgaaccactgcacaccagcctgagtgacagagcaagactccatctcaaaaaacaaacaaacgagaaaaaatgaagacaacaaaaatacagtggtgatgggcaacatgaagaaaccccatctctacaaaaaagaccaaaaaaaaaaaaattagctgggcatggtggcacacaggcctgtggtcccaggttctcggggtgctgaggcaggagaattgcctcagccagggaggttgaggctgcagagggccatgatcacaccattgcactccagcctgggcaacagagggagaccctgtctcaaacaaaacaaaacagtgatgtgacatatacaagaaattagtagtttcaaaaaatgataatggtagaaaataaaagaatgctaagcaagtgcaaaaaaaaaaaataaagtaaaataaggagtggtcatattaacaatagaagggtgaaatttaaggttaagcactataataggataaagagggacaccacgtaatgatagaaaagcacaatttgtaacgacatgacagaatactcaaaatctgcaggctcccgacagcatcgtagttaaatataaaaagcaaaaactaggaaaagcaccagaagagctttatagagaaaatgtgagtggaaggtttaacataacacatctctatcagaattagagtaaaagacccctgcccccaagcaaaggatacaaaggaaatgaaagtttgaataatataatcaataaacttgatttgatgcagttaggaccttatagcccttaaatggaaaatatgcatttttccgtccagggattaatatgcattaatcccagcactttggaaggctgagatgggtggatcacttgaggtcaggagttccagagcagcctggccaacatggcaaaatcccctctctactaaaaatacaaaaattacctgggcttggtggcgcacacctgtaatcccagctactcaggaggctgaggcaggagaatcgcttgaacccaggaggtggaggttttggtgagccaagactgtgccactgcactccagcctgggtaacagagtaagactccatctcaaaaaaaataaaataaaaataaaaataagaaaatatgcatttttcttatatgtctatgaaaaacttagaaaaatcatttacttggtcacaaagaaattcataataaattttaaaagtggagattttacacatctggagaaaatgaatgctttcctagtaaaatataaaatggccaaaattaactagaaggtgagtagaaacttaaataaactaattaccactgatgagaaaaaaaatctgccactgaaaaaggcaccaggtccagagggtttcatgagagggaactgtagaaaccttttgaattcatctttgccaacaccttcctcctccaggaagcactcttggatttccctcttgcgaacaagattctgggaggatggctcctccaacatgccccccacagctctttgcagatgcatcatgtcatatcatatcatatctgccataccataactaccatgccataccatatcataattggatctgctgttcaatttctcctggacagtaagctacctgagggcaggaaccatcctttatttttcattgctccctagtgcccagtacagcagctgacattcactgactaggtgaatatggtaagtgaaaaagcagaaggcacaatcgtcattacgctgtgatgtctctatgggaactgcccaagacatacacataagaaggcagaataaatgggaagaaaccaacatgctaacagtcatttgattgagatttcctcctattattcaaatatttgtaatggagttaagctatttttatagggagggaatagtaatttacacatttaactgggccaacgaggagaaaggaagggggaggttgggaggattctgcaggcaggcccttctgctacctctgcttcctctctctggcccagcccctagacagacacaaaggcctggacgggggcccctgccccactcccttcatgcctcacaggggacccccagccaggagaaggcaaggaggcagggtgggcacccacaggggcctcagttggacagaagggtcctgcggggctcacctggcaacagctctgcaagttccctcaacaccagaatccttctgcaatctggaaacagagcttcccaaaatttagcaagagcacctgtgcccctatgcccctgtgccccagagccctagtcctggcagccctatttccccctcaatatgaacaaacagccgctgacctctcactccccggcacagatccagctctgaatctccctaacattcaggcatggagccccgaccgcatttctggtcagcagctaccccctggtcacgatcatggactttcccattccccagggcctggcactgaccacccatccaggctggcattcagaagtactgatgcccacccttccctgtactggacatagtcatctctaagaagggcagagaaaataggtccatgggagctaagctatgaggaggcaaaggcctaagaatgatataatggactttggggacttgggagtgggggaagggtgggaggggggtgagggacaagagactacacattgggtacagtgcacaccactcgggtgatggctgcaccaaaatctcagaaatcgccactaaagaacaaacaccacgtgctccccacaactattaaaataaaataaacattaaaaaataggtctagagtgaggtcaactactgaggcctgggaaggaagtgagggggcaggtggggcccatctcaggcctctgggggccgaagggagccagggactaaagaggtgagaaccaggcgcaggctccagggagacccccagagaccatgtggcctgcaggggagttgggggggtgtgcagggagatctctggggggacagcaatgtggggtgagggtgggaggggtacccaagaagctgctctctcctaagtcaggtcctaggcaggcagaggggctcttgggacagcctggggctgcaggtgagtccctgggagggagacagctgaggcggctgccccagctggagggtgggggtgagggttgttggaggagggagtacaggcaaggggctagctggagtcccctcaatttggacttagcttcctgctattaccaacgccccttgccaaaggctccctggctggccctgagtggggacaggtgggtctgtcccgaggccagtttctttctctcaatcacagcggcctcgggctgccctcggagtttgtcctaggaagtgggtgctgggcctggatccagagaggaggggcccccaggtgggttttaggatttgggaaagggaggggagagagtggagaaactgctgtggccgccctctagtccctcaggggcaagggctcactcacagttcccagcggaggaggagaaatgagggcccccgctccttccagtcggggctgcctgctcaggtgcggcgcctccagggttgcttgtataagaaggtgcagcagaccggctggaacttccctcccagcggccaatgccccagcagcaggggcgggctccaggccagctccacccacctgggccttcccacttctgggtggggatggtgactgcaccctgagatcccagagccaggaccacagccatggggaagagtctcagaggcccctttattgcaccgcctttggcctggcttcccagggctccctgagtggcctctttgggagagaggaggagtcatccctgcttacctctccctgtctccctgtctcccctctcagaaggggttgcttctgccctctcctgggcagcaagagaacaggagacgtccctctcctgggacatcaactctcccaccacagggctgggcacgcaggatgctcagaagaaggagcgcttgcttgccttcagcttgtactgttcttgctgagaggaacagggtggccaaccctaaaggccacctggctgaaactgaacctgctggccagggtggggcttggggtcaggggcctggaactgtcctggacacagccacttcctggctgtatgagcttcgtcctgtcactaaacctctctgaacctctgtttgtactcagggcaaatggaggtgcctacacctgccttccaagctgctgggagcttaaccctgggttacaagcctttgagcaagagcccacaggactgttagcccctttgggactgcgtcttaccacactttgtccccagtgtccagcacagtgaccagcccacaccaagtactcaatatgtgcgattagagtgcatggggagtgacaaggctgtgaaacaccatccatggcaggaactcctctgttctgggggtccctggccttgcccagtagcctgccctaagccctgagctgccgcctgacagacgggggtccctatacactccccagtgcccccgtgccatgccatccccacatcctgccccctctgttctgcacccactttcttccgagatcccttctcagcaacaatctcctccccatcttcagcctccccatctcctgcccacccacctgaacctggggatgtttccatctatgacctacaccccctctggccacgctgtgtctctctctctccttctgtctgttgtctacacactcaattcgcaccctcacttcactcctgaccactgccctctgccttcagcacccccctgaccagctgagcttctagtggccacttcggataagtgttatatggcctttctctcacgtcaccttcctgtgcatctttcttctggacacttcttgtcctctgagccagcactctcatgcttctcttccctttgtctggcacctaaatccaggcaggccccacctttctccaccctgctcctccccaagtcccccccaccccccaactcagtaagcagcaccactgtctgcccacaagtgccagctgggaatctgaactcaacccgatttccctcccacctccctcggcccccagaccctgcccatccatctcccaaacctctgttaccaccacatgcccacgagaccaccaagagcttcggccattcttgaggccctggccacagggatttttttctcaatcccattcctgtctctgctaaaagcctcacagcagctgcaggataacgtgcacattcctggcaagggctcatgaggccctgccccggtgggcacccactctcaaccccatgctccactctgagccccggccccatgtcttctgttgctggcctcctatccaagagggtgagtcccccaggaccgtggctgtgcctgagtcctctctagatccaaaggctcaccagggctctgcagctatttggctagttcatgcctaatgaacgagtgaatgggcctggaggattatggtggggaaatgccgcctgggacaactaagggcaggggtggggttcccttgtgggggcaggaccaactccctaccctggactttgttgggggtggagcaccagggagagccacagctgcctcttgaataaagctccgtggcagggaacgtggtattattgcactcattgcacaggggaggaaactgaaccagagacgcaaagtgacttgtggaggtcacatagtgaattagggccacaagtggggccagggagcagcctgtctctggccaatgtcctagttcccccctgggtaagtcccctgccctcatcacctgtgcccctccccccatatgccactgcaactgggaacctgctgggagctggaggaaggatgggcagaggggccacctggcaggcgccctggcagccggggtgatctgtcttctcaggagatgtcaggacctgggcagtctccttcctctttggtcctggggcctggggtggtggcccttgggcagacctacagaggcctggctcataggtaaggggctgccgcacctccgccctattcaacatacactctctgtgcactctgtctgagccagaccctgggccagatgcgaggttcaaagagcaaggccattcccccacctccaggggctccgctcagacgggcaggcaccgtcccaccgtcactaggacagagaatgtggagaggccgggaagtgcgccaccgggagcctgcgcaggaaacggaggggcgctgcgggggaagagcgctggcatccagccacccatcccagagaagctgcctggctggctggcaggggcgcgaaacaggaaccagccgcggtctccagccccgcccgccgggtgccgttttccaccctggccacaaggcggcgggctgccgctgcaggagccagagtgaaggcggcgcagacccagggaagccaaacgaggatgacccagtctgggtggaccccctgctgctgccaagcgcttcgaagccttaattcatttaaggctcacaaccctaatccttaggtattgtgcttacaccagaggacgctgggcctggggggggagggggtggtcctcgcttgtaagttaagtggctgtcagcagctggcagctgccccagcaaaatccagttcccctttccctagtctcaaaacctgagctctgcattgtaacgagacaggcggagggaacacccagcagcgggcctacggaggcgtgtctccttcgtctgggcatcccggactcagtcctggcacatggtgggcatcagtgttcatggtaatgacatcaggcacagcgaaataaatcagaggctcccaaggttcagaggtcatctgtccatcccctccctttgtgctaaagaacaaaccgagaccctgagagaggaagagagctgcctctagatcatcacacggccggtggcagatggcagaacggttctaagcatccttttctccccctcgggctgcccctccctgaaaagttcctaaagttcaaaatgtcagagtcccccagagtgttctgaggatgcaagagtgtttgtaaaacgtgctctattttcgatttcccagattaacacaactggattctgaagaggggaaaaaacaacctcacttaacacgtctttctgaaacaaacccatcaggagttcttttaaaaaaaaaaaaaaaaaaaaaaggaactgaaatgctggaagcaccctcaaagggaagcagacgcctgactttcacatccaccctctcatctgactccaggctccttgagctggcggcaggcccgcaatcccccgttccgtgcccagatgcacttcggaatatagaacagctgggacttggaaagataatatgtggcacccacctgctgtaggttacataacctcccagcagggcttggggcagcagccggccatcgagcttatttgcatttctgcagcaaaacatgaatattcacacaagtgcgataaataaagaccatcaacagcctcatatcagttcaagcgcaattttgccaccaatttgattacgaaaaatctttcgggcttccagggagctttggagcctggaaattgcagatgagggatgggggcctgcactgtttcgcggctggggagagggagctcatccgaagtcttccgacagaggtgggcgtcatgcccgacgctgagcggagtgggtctcctcgagcccaggctccctgcgggcgctgtcctcagcgagcctccccgcctccgcgcccggggtcgtacctgcttcacgatctcctaccgcggcgggccgcgtacctcctggatggcctcttagacgttctctgagtcgctgcgcgacaggggcagcaggcacacccaggagcccgctacgctgcaggccttgaagctgccgctgcttccgaggttgccggcgggaggcgagacgacggcgcgcgtcaggtcgtccagggactgcgcgggccgcacgggcgccgtgggccgcaggtacaggcaggcgggcaggccgggcgccaggctgctgcgctggctcgcggcgccgcgctgcgcagggccgcacagggagctggccccgcctcggggctccgctggggggccgttgggggccgctgccacagccgcgctcacgaaccggtagtcgtaggcgagcggctcaggggctgcgggtcccgatggggggacctggcggcgcgtcagcggcagggttgcccagcgcaggcagctcgcgcacgtactgcgcgggcaggtagaaggggcggccgccgggcttgcgccgcacgtgccaccaatgctcagtgctctgtgctgcgccgcagcggccggtagcgctcattgggcgggatggccacgcggcgcccgtccttgccggtgtactcgaaggggtgctccaccagtacgtacacgtccccctccacatccgccgccattgcggccgcggcattttcctgcaggcaacaaggaagagggccgcggaagtcaagaccactgagcccggaatagcccagcactcgaggagagacttgggttcgagtcccgatgctgcacttgccgttcgccttcgggcctcagttttcccatttctaaaatgaggacttgaataaaatcacatgcaaggcttccattcttacactcagtgctggaattaggacaacctcttcattccgtggggttgattctaagatttcagcctcgcttcagtcctgcggtggggagattgtgggtagtcttggtccaaatcgactgcgagggaaactttggctttaaaacgaggggtgattacctgctctaaggtcgacaccacgcttgcttgatagttgaccgtgccttagttttcccgtcagtcaagtgggaagagcagcccatttcctgccgctccccgggccctgtcccgcctggacgcctccctccaggagcctgcgccccggccccggggtcagggttgggatgcgggctctgcaggcgccccggcgaacagctctacctggaggctgtccctgccccgcttagtccaagggccttggtgtgggggcctccgctgtcaaggcgggggaaccggttctctcggtttctctccccttccccagcggcttcaacgcagacgtgagcccgagccgggcccgcccccgccccctgctctccggctctcacgccgccccccgagagaggctgcccacctgccctgtgacccctacagtgtccccaagagagtggcccctggagaatgcactctgagacagtgactgtccgtgcggagtcccaaagcaggggccctcaaagctctccggagtggtcacaagccccgctcccgccccggctgggtgtgtcagggatgggggagagcttaactaaatctgccggcgcccctccaccaaagccatgagtcggtggtcttctccggaagtgcatggcccctccaagctcccacactgaccacatctcctcctgcctcctaaggtgacccaggccaagggccaggagaccgcggcttgccgaggctgagggaccgaaggagcagggtccaatccgggactcccgtagggctccttcgccactttgtcaagcgttcctcgactaggaaagggtatacacttgagtcactaagcacactgggccccggaggcggggtcatcgagctgcccagagccaacaaaccccaaggtggacactgccccggcgccccttccccccggaccccgcagcgcactcacgtctgctgggcgggcctcagggagcccaagggccgggtgggcggggccggcaggttaggcccggaccatcgccctgggcggggcttccgaggtggtgccggagaggtttcgcggaatcggagctggcaacggcagcgaatagggacagcgacgctcaggagtgctgtcacccatacccaaagaagctgcgtctgggcggggcgaggaggaacctgaatgcctctgctggggaccttggggggcattgggacgaggaccggagcagaaagccggggtccggagccaggaaggctgcgtctgaaggggcgctggctggtcgctagcggagcccaaggagggtgggcctcccctgtcccgccttcccccttcccttctcccccggggatttgctgtcccggagtccctgcgtccctcccgcctgcggctctgggaatgccggtctggggctggttgtctagtgcgggcgttcccgttcgcggggaggtcattggcaccctgaatcacccactgcgagcccttccaaccggattgtagacctgccagctccgggcccacctcccccaacagggcctttcccggagcaacccggccgggcctggaaaaactccgagagggattcccagcgcagggacgcccaccggagcgcagtgtctcgggctggataagaaggggacccggccacagctccttcgccaacctgcgggaacacagagaaggggagggattggtgggggccgagaggatccctggagcgcgagagcgcacccgtcgccaggaggtcccctgcgtccactgcccaggcgacgcaagctacagcggcgtcaacgcctgggtcggcgctaggggcctgggcctgctccccacccgcctccagagggagggcagcccttcgcctaccttctcctccccgtgggatgcggcccgagcagctcccgccccagcacggagacaaggggagcaggcgcgcggagctcccgggtgcggacccgccacctgccgcacccttccctccccaaccctgcccctttccccacccccaccccacctcccacctcaactcccgctcggcggcccactgcctgcccgggcacctcggggcgtccgctcgccggcctcgtctccacttgtcccggcaggcgcgcgtgggctcggcgtcccgcgctccctcctcgaccgcgcggctccggcgctgccaggtttcctgtatagcactataaccagtgaggcaccggcggagagcgcccggcagaacttcctcccggactggggctgggctgcggttgcgagagacaatccccggcgtcctggcttcctgtcgcctctgggccaggcccgcgcctgaagaggaaagatgccaccccctcccctgcatttcccgggatcctgggccactcccgggatcctggctgtctccagggaggaagaggccgcggggctgagatggtgggactggggatggcgggagtctcccgcgcagcttctcctggccagattgccttcccaccatcccccactccctcttgacccttgcggggaaagaggtccaccctccaatccgtccacagggtaagctcagaacaacctcctgggggccaggagtccagccccagggccctccgccttgggggtcttctgtttgggaattatctgcctctctggacaagctgcctcgccctgatctgagcctgcgctcactccacacgtcacaaaccacagccctagcagaccccctgccctcaggggcccccagaaacagttgtgcctatggacgtggctgtgtgtgcggagagctggctgattcaggccagtgttctgggacgaagagaagcccacaccccaggccatggcccctcttgactccacctcctgggggcccagggttggatgggaagctgaatctggccacactcgttctggaactcccttacctctgtatctttgcccctgctaggcgttgcccacccgtgagtctacacttcctctgagaatctcagtgtgtctgaggcctggtggcactttgggaccctccagggtgggcacacagcagaactcagcattggtctttggtgcccgacatgcttagaaaatagtgactggaggaatcttctctccctccctaccttttaggtctctccccacctgcagcacagccaggcagcggctggcagtggtgatggtctttgcgtggggtcaggcaggtatgatgccccactctgctgcttggcggctggtaggccttgggagttctgccttatctctgcagctcagctttctttcctatcaatagtaacacccacttcactggattattgggaagattaaatgagatccactaagcagtgcttaccacatgcccagcgtacaccatatatcagctatttttttttttttttttttttttgagatggagtctggctctgtcgcccaggctggagtgcagtggcacaatctcggctcactgcaacctctgtctctgggttgaagtgattctcctgcctcagcttcctgagtaggtgtgattacaggcacccaccatcatgcccagctaatttttgtatttctgcagagacggggtttctctatattggccaggctggtcttgaactcctgacctcaaatgatctgactgcctcggcctcccaaaatgctgggattacaggcgtgagccacagtgcctgcctatatcagctattatgacacttttattatgtgatgagctcttggggtttggactggaatctccaaaccacccgtcctccttcaggcagaagagaaggggaagtcccagctactcgggaggctgaggcaagagaattgcttgaacctgggaggcggaggttgcagtgagtcgagatcacaccactgcactccagcctgggtgacagagtgactccgtctcaaaaaaacatgggtgagaaggggaaacaagtgccctcagaggcgcttggctgaggatggagaggggctgagcccactggcagggcagaaccaggtcatgtgccatggccctccactgggcctccctcccccagtttctcttctcttctctggccctaccatctattgtccttgggggaagctgtggcacctagatgggcagagggtgccaacttgtaatctgaaaggggccttcaaggacaggaaatcgcagatctga

SEQ ID NO: 39 - DNA, 23705 bp, Homo sapiens
  source 1..23705: mol_type = genomic DNA
gtgtgctgggggcgcaggaccaggaggcgtgagccgggggctctgggtggatttagaagacacaatcaggtgtgcgttggagtaggtgcagcctggagaggtgagggtggattgatgggtggagttaggggagggcctggttagtgggcggggccataggaaagtggggcgggggtatttattgtgtgggcgggggtagagtgcaagggcgaaagaggagtgtccgaaaaaggagtcaagtggggtgatagcttcgagagcaacctgggcaacctagggagaccccatctctataaaaaatttaaaaattagctggacatggtggtgtgtgcctgtggtctcagctacgcgggcggggggtggcgggggactgagacgggaggaccacttgatcgctagggtagtacaagtatggggcggggccagagagtattaggggctggagggtgagctgaggtgggacctgggaaaggcccgatccggtagccctggccccactcactgcagattcgcggcgggtcacacactgaccctgcgggtgcccgccgcaaggtcccagccggcagcggccttcgtggcggccgagttccctggggcggagctgcgcgaggcacatggaggccgcctgcgcttccagctgccgccgggagggcgctgcgccctggcgcgcgtctttggagagctggcggtgcacggcgcagagcacggcgtggaggacttttccgtgagccagacgatgctggaggaggtgatcacggcgccggggtcgggctgggggaggcaggctgggggccaggcccgtgggctgaccgtccctcttgtcccctctgggctgcccaccgctaggtattcttgtacttctccaaggaccaggggaaggacgaggacaccgaagagcagaaggaggcaggagtgggagtggaccccgcgccaggcctgcagcaccccaaacgcgtcagccagttcctcgatgaccctagcactgccgagactgtgctctgagcctccctcccctgcggggccgcggggaggccctgggaatggcaagggcaaggtagagtgcctaggagccctggactcaggctggcagaggggctggtgccctggagaaaataaagagaaggctggagagaagccgtggtggtgaaaccgtgtgcatgtgtgtccttgagccaggctgcacacatgtccacacagctgcctgcacatgcgtctggatatggctggccccttgcaagctgagtgtgcacatacgggccaagtggcgattcataggacacaggtgtgagcgtgcctacagctgaccggatcccagctgtaaatgcctctgtggccagcccaggagttggggatgtgagtgcgggcctcataagggcctggtcacaccgtccctgtccccacgtccctgcgtgcctatgtggggctggcgcctaagggcggtacctgtaagtgcctggccataaagtggggatgaggtcaggactcaggaatgtcctgggaagcttacaggagcccggtgtcccggagcacaggccagggccgggccagaagcccatccgacatccagctgaccctcaccctctgaccccagccctcagcgccatgagtcgggggcaaagagttctcaagggtctgctgggctgggtttgcacttggacctgggcctggagagccagacttggagcaaggggctgtggccttcatgtcctgtgccccagagatctgcccctcccacccgaggtaggtgggaatggggtttgggaaaggaaagaggttggggttttgggattgggggtggggttctggaaggggacagcagggagacttggggaggggggagagagttcacactgcggggtgggggttgggggaaggtaggaggctgggatctgtatgcctgcagatgccccagctcttggccaatgccgcctcaggctgttatcagcaacgggtgcctgcgtcctgctgcccagcacgtccggtggtccagagtcactggaatgcagcttgggaggcggggctggggaccttagctaagggcaggtctggggcaacatgatatggcccacagggctgctgagaggtaaccaggtgtcctcagcatattctgccgatggtggggtccacaccacactttggggacccctgtgcaggcagcccaggaccaggtggacgtggggacccagacggacgtggggacccagacggacagggcccggtaacctggattgttctgacttcctggacgtctttgcccccagggtttcggttctgggcctcagtttccccacctgtcctcgacctgacccacttcacggggctgcagggcgggtgatgggggggaccctactctgcccggccctgctggggcccggccacaccctagggtctgcaggagaggcggtggagcgggcttgccttcagggaaaagggggctgcaggggcgcagcttcggcctgtgcgtgtgtctggggtctgagggcgaggctccaggggcttggtggcgtctgagcgcgtgtggaggtccgggtctctgcgtgtcatcgtgcacgtgtctgtgcacgcccactcgcgtccgggagtgagagtcagcgccctgcagtcggccgccccgtgcccgccagcgtcaggcaggggctcccggtcccaccccgcgagcggcgcggctccgagctcccgaaggcggaagcggggggcgcggcccggggctgggggcggggcctgcgacctcaccttcgcgcccactccgcagagccgcaggctgaggccgggaagggtcgggggcgaggccgcgtcgccgcctccccgaagccttttcctgttggggggagggcccgccagtgacggccgggcctgtcacgtgggcctgacagctggggagggggtggccggcgacaatgtggtcccgaagcggccagcgccgggagctgcagcgctgagacccccagcccgccccctcgggctcccggccggggccccatcatgttctccaggaagaaacgagagctcatgaaaaccccttccatctcgaaaaagaaccgcgcgggaagccccagcccgcagccctcgggggtgagtggagcccgggtgagacccggagctgacgccgggccgcagggggacagggacccgccctgtgctcggggctcatgctggggcggcggctgggggctcgtgccagctacagcccctaccgggcgggacggcaggggccacagcagagaggccgggaccccggcattcagctcacggtagggaccctgggagtggtggccgcctccctccactccatccagggctggccgcggggcccagggagcaggaagggagggtgccgggttgggacgatgttgtgtttgggccgctgcaggttgggggcttaggcaatctgggggctctaggggccgttgagatgggagggctgtggcctggccattgggctgaaggttgaccgggcagcagatcctctaatgggatccaccaggttcagaggttggggagtgtccccaggcctggggtgtctacaaagctggggggggggtctacagagcttgggggtccgggatgtctacaaggcctggggctgcccataggctctggggttccatggacctttaggggacagacagagtcagaagtgtgttcacttaaagcacctgcgttgtaggagcctgaggggggcttgaagggctgaggaccctccccacccccaccaggaagtggggacccccctcccgcgcctccccgcaggccccgccccggctgtggtttgggcaaggaccgttgtttgtgaaagctctagggaagaggatgttgggtaacaggtgggggggtacactaccaaatctcggccctgtgacctctggcctttgacccctgtggggtcagggtgatggtggccctccacagccccacttcatttctggggaaactgaggccgtgtccaggccggaaaatccctttaacgagctcccctcggacctgcccaaggagctgcccaggaaggatggggctgacgcggtgttccccggaccaagcctggagccgcccgctgggtcctccggcgtcaaggccacagggaccctcaagcggcccaccagcctgagccgccacgccagcgcggctggcttccccctgtcgggtgctgcctcctggacactgggccggagccaccggagcccactgacagccgccagcccgggcgagctgcccaccgagggtgccggcccggacgtcgtcgaggacatctcccatctgctggcggacgtggcccgcttcgctgagggccttgagaaacttaaggagtgtgtgttgcgtgacggtgagagccacggggacaccgaggcctgggtggaagacagagccagacccaagggaggatggagggagggacttggggaggctcagaagggagggaggctcagatggcagggagggctgtgtggaagaggccatgacagctaaggctctgagggatgtgtaggagtttggtgggggagtccctgagcgtacactggctcaagagggtgcccactttattttttttaaaggatctgatggcaattaggagggaaaggcagaggaaatgtcccatgcacaggctcagaaacacggaaacagagaatgcatttgggggccaaggtgtggggtgccgctggtgtaggatgaaggcatgacaacgccaggcagaagggcaatggggagccatagaaggtgttagagcacaggacagatgggggcagatctgtgtcttggaatgaagcaaactgggggttggctgaggtctgggtggagagagattcaggaggcatggcgaggggcaggatggggtcatcaggcggcggaggtgctgggacccagcggcctgcaggccggcagttccgttttctcctccacgcggccgctgacagccctgcttcctgccgagttattttcatctgcttcctgtttgtccctggcagcccaggcgggcacctcatgtgctgccttcagcccccggctcctcccagaaaccacagtgccagggtcatgccaggcgctctgatctgctcccagcagccgcccattttacagatgacgaaactaagtctctagtgaggccctgacccctggctcacccagccagggcagggcagagccaggactggacctcaagtggtggagtggcctctgcaccttcagggcactagttggggaaggcccggtccccactgggaggagtgggagcccccgggttatctggtcccaggggcgggggctaggctgctttcctggggaaaccctaatctcggttcctttccgatcctggcgcttccttggaggcctggcctgggcggggctcagctcccaggctcctgcaggaggtctgaactgggccagccagggtggggcacttttttttttttttttttgatacagggtcttgctctgttgcccaggctggagtccagtggtgtgattgaggctcactgttaccttgaactcctgggctcaagccatcctcctacctctgcctcccgagtacctgagactacaggcatgagccactgcacctgatttattttattttatttattttatttgagatggtgagatggagtctcactctgtcgcccaggctggagtgcagtggcgcgatctcggctcattgcaaccttcctctctcgggttcaagtgattcttctgcctcaggctcccgagtagctaggactacaggtgcgtgccaccacacctggctaatttttgtatttttagtagagatggggtttcaccatattggccaggttggtctcaaacccctaacctcgtgatccgcatgcctcagcctcccaaagtgctgggattacagcaggcatgagccaccgtgcccgggcttttctttttttctttctttttcttttcttttctttttttttttttttttttgagacagagtctcactctgtcacccaggctggagtgcaggggcgagatctcagctcactgcaacctccacctcctgggttcaagtggttcttctgcctcagcctcccgagtggctgggattgcaggggcgcgccaccgtgcccggctaattttttttctttcttttttttttttttttagtagagatggggtttcaccattttggccaggctggtcttgaactcctgatctcaagtgatccacccacctcggcctcccaaagcgccaggattacaggcgtgagccatcgcgcccggccagtttttgtattttttgtagagaccggggtctccccatattgcgcaggctggtctagaactcccgagctaaaaaccgttctcccggctccgcctcccaaagtgctgggataacaggcctgatccaccgcgcccggctgggggcgccttctgtgcgtctcggggccgccccaggccagagaagaccctggcggctaggatgtgggctctagtcccgatgtttctcagctgctgagaccctggcaagccccttccctctctaggtgtcaggtgacttatctataaaatggggccacctgcatgcagcgatggttgtggggtccaccccacagcttggggacccgcgttcaggcagctaggaggggacccacatggacggtgccaccccgacacttcccgggcttcctcgttcccgggcttcaggtctgggcctcagtttccctgcccgtcctcgaccctccccacctcgaagctctgcggttaaggaaggacccaggctggggcgaacgggaccccagggcggggtttccctcgcgggggcggggcctcctgaccggccggagccggtttggccaccggagacccccatcggtcagctgccaggccccacgcgctcgcggtctccgcgccccgacggctgcgccatgtgtatctgcgggacggcgcacccggtgctggacgagggccccgtgcgctgccgggcgggcccccgaggtgaggggacaggtgccgggcgctgggtcccgccgcgtccgggagcacgtggcgctcgggccgtttgccgcccgcggtgggggagcagcggctgccgcgcgcctggcctggccgtgcgcacctgggcatccctgcgctgcgcaggggtcgcgccggccgccggcttcccgggtagggggtgtgcggggacagccgggggtccgtgcgccggccgcgcgcggagtgccgggtgcccggctggaaggtcccgagaaggggcgtggccggggcctcccagcggcttcccggagctcctggagccccaatcccattcccggagtccgcctcgcatccagcagcgaagacatgttccggtccggggtctcaggcccggcggcggccagcggggtatctctggcgggtgactcggtcggtctcttcccggaggtgacattcacctggggtcttcggtgccgaaagggatggggcacttactttttcagatttcatttcgtatttggggcatcctctgagcggtacagtcaggcgtcaaagctgcccctcccgctggcctctgtcctcccgggtacctttcccctcctacgaattccgtgggtttgtttccactacgtggtgtgtgcctggctctcgatgtttcgcctgtactctctgcttttttcttttctttccttcttttcttttctttccttttctttctttcttttctttcctttctttttgggatggaggagtctcactctgtcacccagctggagtgcagtggcgcgatctcggctcactgcaacctccgcctcccagcttcaagcgattctcctgcctcagcctcccgagtagccggcattacagaggagtgccaccacgctgctactttttgtatttttagtagaggcagggtttcgccatgttggccaggatggtctcaaactcctgacctcaagtgatctgcctgcctcggcctcaccaagtgctgggattacaggcatgaggcactgtgcttggccctctctgcttttttcttcttccaattgagaacgttcgatgagggcatttagctttttattctttattttatttcttacagagacagggtcttactgtattgcccaggctggtcttgaattcctgggctcaacccgtcctcctgcctcagcctcccaaagtgctggggtcacaggtgtaagccaccacccctggctgaggagggcagtgaaagccaggttccaacagtcagatctgacctcctctgttctaacaccttctatggctccctattgccctggagataaagccaggcaggatccctctgcctggcgttctcacgccttcagagctagcgtagatggaaaagctgtgtgattgttgagaaatggcttcccctctctatgcctcagtttcctcacttaggaagggcagagagagacctggacagggctttgagcagtcctgaggagttagggcagggaaggagcctggtgggctgcatggaggaaggggctgcaggactgtagcttgaaggacaagaggcagtttgctttctggagggacaagaaaagagtgttctgagcagcagagtgcctaggccaacgtctggcctttgttgatctggccggtagcccagggagggacagtgccctccccgcggtctcgaaatgagccccaggcatctgccgtcttccacctctgcctcagtttccccatctgggaacaggagctctaaagagggaggaggtggacagactttccctgggactgggccctaccccactgctcactccgactctccccagcagacctccttgaggcccgccgcccgcgggcccacgagtgcctgggtgaggctctgcgtgtcatgcatcagatcatctccaagtacccgctgctgaacaccgtggagacgctcaccgcagccggcaccctcattgccaaggtcaaaggtcagcctgctggaacagggctgcgagggctctctgcctagaagggcatcctggaggaggggatgtttgaagtgggttttgaaggatgcataggagtttgacaggcacaagctccctcctgttccccctgggttaagggctccggtcagttcttgcagggatggtcacctcccagagtgggcccacctccttgtccttatctctgcttcccagccttccattatgagagcaacaatgatctggagaaacaggagttcgagaaggccctggagacgattgctgtggccttcagtagcacgtgagcacgggagcctgtggggcagggcaagggagcgtggggggcccgggtgtctctcgatggtgacctcgctggccctgcagagtgtccgagttcctcatgggtgaagtggacagcagcaccctcctagcagtgcctcctggggactcgagccaggtgagtggggtgggccagggccacctgtgtccagcttctggaggccagccgggttcaggtctgcagggcccagacagtcaccctgcttcccctgtgcgccttggtttccctctctgggggaggcagcaaccgtcccctgaagggtgggcactgcccagggccccgcatggggctggtctcacctgcgtctccgtcctacagtccatggaaagcctgtatggaccgggcagtgagggcacgcctcccagcctggaagactgtgacgccggtaagcccccacccagcggcaggcaggcatttgaggggtgggccattgcgcgggtcgggccaggctgagcaggcccccgttccctgcaggctgcctgcccgccgaggaggtggacgtgctgctacagcgctgtgaggggggcgtggatgccgcactgctgtatgccaagaacatggccaagtacatgaaggacctcatcagctacctggagaagcggacgacgctgggtgagagctggtgtcccagcagggtgggtctggagggagggggttctgggtgagctgggaaggccttgtcccagcacctcacacccctctccggcccgcagagatggagtttgccaagggcctgcagaagatcgctcacaactgcagacagagcgtcatgcaggaggtgggggccccgcgggcacggggcgggggtccctgggcccgggtgtgagtctcagccccatttcaagggcccagggaccaagagcaggggcttcccctctacattaacgggggtggctgcagggaccagggagctggtggctgggggtgctggggccgccctgcctccatccctccccacccagtgagccggtgccccacccacagccccacatgccgctcctgtccatctactcgctggccctggagcaggacctggagttcggccacagcatggtgcaggcggtgggcaccttgcagacccagaccttcatgcaggtgcgtggtgcccgggagggcgggctgggcgggggtgtcaccggggtacccactcacggcccgtctcgccccagcccctgaccctgcggcggcttgaacacgagaagcgcaggaaggagatcaaggaggcctggcaccgtgcccagaggaagctggtgaggcgggcgggcgggggcgggcgggggcgggcagcgggcctcggcgcaggcgcagtcccagccccagccccatagcgagggccctgcggcgagctccgcacacgccccggcctcctgcgcatgcgcggcctcgcaggctgggccgccccccccaacgccaagccgggtcggagatgctccagccccgtcgcccccagctctgcctggaaggacccaggagcccggcgctcactgctgtccctgcagaaatggggagaagccgtgcctccctcggttgtaagcagctggtctccgggttgagggagactgatggtctctcaggactgggaaagcgccatgctcctgcatgtattctttttttttttttttttgatacggagtctcgctctgtcgcccaggctgcaggctggagtgccatggcaccatctaggctttcactgcaacctccatctccctggttcaaacaattctcctgtcgcagcgtcccgagtagctgggattacagaagcacgccaccacacctggctaatttttgtatttttagtagagacggggtttcaccatagtggtcaggctggtctcgaactcctgacctcaggtgatccacccgcgtcggcctcccaaagtgctgagattacagacgtgagccaccgcacccacccggcctcctgcctgtattctcttcccacttcgcttttgggttatttcaaagacgccggcgcctttttgtttgtttctttgcttgttttgagataaggtctcgctctgtcacccaggctggactgcagtgacgcaatcatacctcactgcagacttgccttcttgggctgcaatgatcctcccacctcagcctcctgagttcctgggtctacaggcaccagccatcacacccagttcatttttttgtattttttgtatactcactatgttgcccagtttttgtttgctttttagctgtgttaacacggtctgcagtgaaacgcaccctcctagctccttccagcacataccggcaaacacatatctgccctgttttgtacacacgaggacagctcacctcatgccctgttctgctcctgatttttatcctcacctccatatagagaggctcacccgatatcagtcagcatgaagcagcctgaaccccttttttcggctgtgcagggctcagctgaggagattgagtaggttatttcatggacgtcttgggagtggctgagctgttgctgttacgaacaccattgctatgacaagcttgtgcccctgtctcaaggatgcctgagggatcagtgcccaaaatagaactgctgggtcaaggggcgtgcgtgtatgagctaccctcccaggccacagccctgcttttcctcttctgtgaaccctcagttcttaacctttgcttagttcttatcctttgcttactttgtactggacagtggcttatcattgatttgtcagagctttttacatattagagaacttaggccttaatcatgtgagttttagactccccccattcccctcccacaatttactgtttgacttttgatttttacctgtggcctattttgccaggtagaaacctgtgattgttggcagtagtcttttttttttttttttttttttttttttttgagacaagagcctcactctgttgcccaggctgcagtgcagtggatcgatctcagctcactgcaacctccatctcctgggctcaagcgattcttctgcctcagcctcccaagtagctgggattacaggcgccagccaacatgcctggctaatttttgtatttttagtagagatggggtttcaccaccttggccaggctggtctcgaactcctgacctcaggtaatctgcccaccttgtccttccaaagtgctggaattataggcataagacaccgtgcttggctaatttttatatctttggtagagatggggtttcatcatgttggccaggctggtctcgagtagctaggaccacaggtgtgcgccaccacgtctggctaaattttttaatttttttgtagagatggggtctcactatgttgaccaggctggtctcaaactcctggcctcaagtgatcctcctgcctcggcctcccaaagcactgggagtacaggtgtgacccatggcgcctggcggtctcctagtaattggatgagtccgtttgtttgtgtgcgaatctgatggtgcaggttgtgaggtgtggcccccgagcccacaggtttttgactaagtgctcttcctgccaacctgtgggcgcctggcttcctgcctgggcggcttctctgttctcgtctgtgaggagggaagtgaaagcaaaagagcccggagacgctcccgtgggggctggtgtgcgtgtctgcagaggctgccgtgtgagcctctgtgcagagcttggctgcacctcagcttcccgggctgcagagtgggcacacaggacacccatttctccgagtgtcctgttacgggtgcctcctcccgttcttttttttttttttttttttgagctggaatctctgttgcccaggctggagtgcagtggtgcatgcaatcttggctcactgcaaccttcgcctcctgggttcaagctgttcgcgattctagtgcctcagcctcccgagtagctgggattacaagcgtgcaccacaatgcccggctaattgttttaaattttgggtagatacggggtttcactatgttggccaggctggtctcaaactcctgacctcaagtgatccacctgcctcggcctcccaaagtgctgggattacagacgtgagccaccgcgcccggccactcctcctgtttttccgctgccgattgttgtgcagggtcctctgcatgcccagctgggccatggggccttgctgagagagatgggggtggggaggaaaggaggagctggggagactgagtcccatccgaggatagggttggaactggcctcctggctcccacacccacagcaagaggcggagtccaacctgcgcaaggccaagcagggttacgtgcagcgctgcgaggaccacgacaaggctcgcttcctcgtggccaaggcggaggaggagcaggctggcagcgcgccgggagcaggcagcacggccaccaagaccctggacaagcggcggcggctggaggaggaggccaagaacaaggtgagggcgggtggaggcagggctggaggtccctggaggaggagatccaatgcttggtgtgacatttactacctccagacctttgtttttgtttttttgtttttttgtttgtttttgagacggagtcttgctctgtcgcccaggctggagtgcagtggcacagtctcggctcactgcaagctccgcctcccgggttcacgccattctcctgcctcagcctcccgagtagctgggactacaggcgcccgccaccacgcctggctaattttttgtatttttagtagagacggggtttcactgtgttagccaggatggtctcgatctcctgacctcgtgatccgtccacctcggcctcccaaagtgctgggattataggcatgagccactgcgcccggccaatttgttttttggagacagagtctcattctgttgcccaggctggagtgcagtggtgagatctcactgcaacctccgcctcccaggttcacacagttctctgcctcagccaccctgccaccaagcccagctaatttttttgtatttttagtagacacagagtttcaccatcttggccaggttggtctcaaactcctgacctcatgatccacccacttcggcctcccaaagtgctgggattacaggcatgagccaccgcgcccggccccgatttttaaattattattatttttgagacagtgtcttgttctgtcacccaggctggagtgcagtgacgtgatcatggctcactgcagcctctacctcctgggctcaagcaatcttctcgcctcagcctctagagtagctgggaccacaggcgtgtgccgccacacccagctaatttaaaaaaattcttggccgggcgcagtggctcacgcctgtaatcccagcactttgggaggccgaggcaggtggatcacaaggtcaggagatcaagaccatcctggctaacagggtgaaaccccgtctctactaaaaatacaaaaaattagctgggcgtagtggtgggcgcctgtagtcccagctactcgggaggctgaggcaggaaaatggcatgaacccgggaggtggagcttgcagtgagccgagatcgcgccactgcactccagcctgggcgacagaacgagactctgtctcaaaaaaaaaaaaaaattctttataaagatgggggtctcaggctgagtgtggtggctcacacctgtaatcccagccctttgggaggctgagacgggcagatcatatgaggccaggagttcgaaaccagcctgggcaacatggtgaaacccctgtatctctactaaaattacaaaaaattaaccgggtatggtgggtggggggcacctgtaatccgttacttgggaggctgaggcagaattgcttgaacccggtaggtggaggttgcagtgagctgagatcgtaccactgcactccagcctggcctacagagcaagactccatctcaaaaaaaaaaaaaaaaagatggggagggtctcaccatgttgctcaggctggtctcgaactcctggcctcaagcaagtctcccactgtggcctcccgaggcgctgggatgacaggcgtcagccccgcctccctgaggtttctgtctgagtcctgcaccccgggctgaggcctctctctgtgcgccccgcccccaccgcaggcggaggaagctatggccacctaccgcacctgcgtggccgacgcgaagacgcagaagcaggagctggaggataccaaggtgacggcgctgcggcagatccaggaggtcatccggcagagcgaccaaaccatcaagtcggtgcgtggggtgctccggccgcccgggcggggatggtggaccgggcggcctcctcctgacccctccgctctccggtgccgcccgcaggccacgatctcctactaccagatgatgcatatgcagacggcgccgctgcccgtgcacttccagatgctgtgtgagagcagcaagctgtatgacccaggccagcagtacgcctcccacgtgcgccagctgcagcgggaccaggagcccgatgtgcactacgactttgagccccacgtctccgccaacgcctggtaccgccacccagctgccctgtccccggcgcacaaggccctgcctgggagccgggcttccctctgtcgggggcatgaagatgaagctgtcttgccccccatcacctcccctccttttcccggtttcttccactaggtcccccgtcatgcgtgcccggaagagcagcttcaacgtgagtgatgtggcgcggccggaggctgccgggagccccccagaagaaggcgggtgcactgagggcacacctgccaaggaccacaggggtgagtgtccggcggggcccaggggcggacgctggctccctgcgacccaccctggcccttcaccagagacgcctctttctccagccgggcgaggacaccaggttcacaagtcatggccgctctcgatctcagactcggacagtgggctggaccccggccctggcgcaggtgagggaggctctctggcgggctggggtgtggagctgcctcctctcctgagcctcagggtttcatcacccaccggggtgatggagggggcccccctggctgggggagtctgaacagtcctgattcccgcccaggggactttaagaagttcgagcggacgtcatccagtggtaccatgtcgtccacggaggagctggtggacccagacggtggagccggggcttcagcctttgagcagggtgagggtcccctgacggggctggagagagaggggggtttggacacagtccatgggcctggccctgagctgccttggtgacaccggctgcctgtgctgcccgcagctgacctcaacggcatgacccccgagctgccggtggccgtgcccagtggaccgttccgccacgaggggctgtccaaggcggcccgtactcaccggctccggaagctccgcacgcccgccaagtgccgcgagtgcaacagctacgtctacttccagggtgctgagtgtgaagaggtgagtgggacgccccgacggacagctgggagccttcgggagcctttggggtgcccagcaccgccggcctgtgtgccctcaggaatgtccggcccagagcagggagcagtcggacgcctttggaaggaagcgaacggagggggtggggtgggctcttttagttctggggagcagggttggctctctgaggcagcgaggcagggggcagacctggagggtgaagagtcctggggctgtggccagaagacctggagggcaaaggccctggagctgtgtccagaaaaccaaggggcgggaaggagaggaggccacagggcaggcgggatcacccctggggtggaagccacgagccactgtccagcttgtgtttgcagaagctgccgtgtgggggctgtgagcgccccggggaggtggggtggagccgctgggggctgcgctgagctgggcgccccggggctgggctcactcactctggccgcccccagtgctgcctggcctgccacaagaaatgtctggagacgctggccatacagtgcgggcacaagaagctgcaaggccgcctgcagctgttcggccaggacttcagccacgcggcccgcagcgcccccgacggcgtgcccttcatcgtcaagaagtgcgtctgcgagatcgagcggcgggcgctgcgcaccaaggtgaggcgggggaggaagcggctcacagcgaggaggcgggagtgggccgaggctgatgggcctccccacccccgggctcccgcagggcatctaccgggtcaatggggtaaagacacgcgtggagaagctgtgccaggccttcgagaacggcaaggagctggtcgagctgtcgcaggcctcgccccacgacatcagcaacgtcctcaagctctacctgcgtcaggtgagacccaccggtggtggccaggcagagcctggaaggggcgtagccaggcaggaggaggcggggtgggggtccgggagctggagcaggactgagctggagcaggactggcgcaagcgggggcctggggaggacagggtgggcgggacagtgcctggcagggcagggctgaggctgggggcgtggtcacggtaggagcgaggcggggccagttctgcgccgaggcacggacagggacaggaggggcggggtggggcttggtcagcacgtggcaggggtgtggccacggcagaggcacacctgacgctgtgcgggggcggggccggggccggggctcggtggggcgtggccagagcaagatgggcgtgttcagcgcttggcagggacccgtatgaggctaggggcggggctgaggctagacaagtgcggggctggcggtggggcctgggcttggtggggcgaggctggggccaggggcgtggtcatccccggggaagggcgggactggggctaggggcgtggtcatgtctggggaagggcggagctgggctgggatgggagtgggaccagcacttcgcaggtggttgggaaggggtcagactatgctgagtggagccggagctcgttagggtacctgcagggcggggcgcgcgtggccagagcgagaaagggagtggagctgcgggcgtggcccgggtaggaggggcagggctcacgctgggctgggaaaggggactgacgccgctctgggtggaacccgagctcggtggggtgtggccagtgctctgtgggggtggggctgaggctgggggcgtggcaggcacacgtgggggctgggccaggcccaccaacacctgctgacccttgactctgcgcagcttcccgagccgctcatctccttccgcctctaccacgagctcgtagggctggccaaggacagcctgaaggcagaggccgaggccaaggcggcgtcccggggccggcaggacggctcggagagcgaggcagtggcggtggccctggcaggtcggctgcgggagctcctgcgggacctgccgcctgagaaccgggcctcgctgcagtacctgctgcgtcacctacgcaggtgagtcccggcatatggagtggagggcgcggggtcccgggagccgctcagcacctggcccctgcccaccccgcaggatcgtggaggtggagcaggacaacaagatgacccccgggaacctgggcatcgtgttcgggcccacgctgcttcggccacggcccaccgaggccaccgtgtccctctcctccctggtggattatccccatcaggcccgcgtcatcgagactctcatcgtccactacggcctggtcttcgaggaggagccggaggagacccccgggggccaggtgagggtgtgggcctgaccggggctggccactcggggcttggggagcagggggcgctgctggggacagtcgttgtcggatgaagcccaaggaaccacagggagataatttggtttggacagggctgttcgggaggccactgtctttttgtgtcttttatgcaaaaaactcagcgaggtctgcattgaatctggcagaggtgcaaaggctctgcggccgcccctccactctcccttggggctggccttgggcctcacccttcacccccagcttccttccccgtttcccatcccggtgctgcctgcagccacaagctccacgctggcccggtgtccacagcctgcccgagctgccactgcactccgccgcgaggtcaattccccgcttcagattttcttttctgggagttgtagtttcgctcctgctgcccaggctgaagtgcaatggggcgatctcagcccaccacaacctccgcttcccaggttcaagcgattctcctgcctcagtctcccgcgtagctgggactacaggcgccggccaccacacccggctaatttttgtatttttaacagagatggggtttcactttgttggccaggctggtctcgaactgctgacctcaagtgatccgcaccccccttggcctcctgaagtgctgggattacaggtgtgagccactgcacgcggcgtctcgtattctttcaatccatcttccctgggtgtttaggggctgcggtttctcgggtttgctcttggctgaggacagaccgcctgggcaacagcgggtgtcagtagctgttacgggctgtgtgggtgggtttgttaatttataacatggaaaatggagccccggcccctctatgacttccgttctgcacttgcaggacgagtcatccaaccagcgagctgaggtagtcgtccaggtgccgtacctggaggcgggcgaggcggtggtctacccgctgcaggaggcggcggcggacgggtgcagaggtgagtgtgtggctgcccgaacggccccaagggaggctggcgtgtgccacccatgggcgcaggtgccatgacctagttgtacacacgtggcagggtccacggtgctgcacattctgtggatttcgtctgccacggagaccacacctatgagctactcattcagtgtcctttaaccggctgcaaaaacaggcaaggcagtgccttttgaggtgcctaccccgcactcagaaaccagtaacgtgaacgtggggctgatgccttgtgaggctccaggtgcaccaggtcaggctaagtgcctttcctgcaggagcccgtttttctagagaagggcgtggggctgggagtttgacccacgtggggccagcaccacctgtcagaggcagctggccgagtgccgcatctagttatgggacacctgtgttgtctgtcttcacactgctgataaataaatacctgaggctgggcacggtggctcacgcctgtaatcctcgcactttgggaggacaaggcagatcacttgaggttaggagttcaagaccagcctgaccaacatggtgaaatcccatctctactaaaaatacaaaaattagacaggtgtggtggagggcacctgtaatcccagctactcaggaggctgaagcaggagaatcacttgaaccggggaggcagaggttgcactgagccaagatcatggcactgcactccagcccgggcaagagagagagactctgtctcaaaaagaaatacctgagactgggcaatttacaaaagaaagaggtttaatggagttacagttccatgtagctggggaggcctcacaatcatggcagaaagcaaagaggagcaagtcacatcttgcatggatggtggcaggcaaagggagagcttgtgtccggaaactccagtttttagaccatcagatcttgtgaaacccacgtactatcatgagaacagcccaggaaagacgcacctccaggattcaaccatcctccaccagctccctcccacaacacgtgggaattatgggagctacaagatgaggtttgggtggggacacagagccagaccctatcaacacctctctccttccgtttctccccttgtctctctctcctcctccccgccatgtctctccatctgtctgtccctccccttgtctctcctccatctctcctgtctctccccatctctcctgtctctccatctctctcccccctctcctgtctctccccatctctcctgtctgtccctccccttgtctctcctccatctctcctgtctgtctccccccgccatctgtctccctttcttagaatcccgagttgtgtccaacgattcggactcggacctagaggaggcctccgagctgctgtcctcatcggaggccagtgccctgggccacctcagcttcctggagcagcagcagagcgaggccagcctagaggtggcttctggcagccacagcggcagtgaggagcagctggaggccacagcccgggaggacggggacggggacgaggacggcccggcccagcagctctcaggattcaacaccaaccagtccaacaacgtgctgcaggccccactgccccccatgaggctccgtggcgggcggatgacactgggctcctgcagggaaaggcagccggaattcgtgtgagctggggtggggctgggaccacaggtggcttctctcttgcctgctcctgtccctccagcacgtcccctgcaccacggcatagcttaggtgcgccgtcctggggtcgctgccgagagcgcctggacttcgacgtcccaccagcgggcgcctcctcccagaggcttccaggagcacgagggccttgcggcacaggactgtgccctgtgctgtcccctgcaccccggctcagctgagctggggaacactgctgtcgtgtgaagtcacagtggccttgttggtgcccacagggctgtgtggatggaggaagctgtccctgcccagtgcatcccccaggtcatcacggggacgcaggaggcaggccctgccctgccctctcctcacaggtctgttgcagggactccagaaaccattctgggagccgtggatgggggcggagctggggtttggtgcagtttccagggtgcagtacagcagggcctgaatactggccctggactcccttttccagaacaccaggtgtggccacctggggctcaggtacacagtggggtctctcggaagccaccgtgtggttctttcacaggcacgtttattttgctgaaataaaaagtttttaatcgggtgttttctgtggcagctgcaagcttagaagattttctgtggcagctgcaagcttagaagaaggggccagggaggggacagagagagccccgtggcgtggccctgggcctccccctaggggagggatgtgtgaggaagggaaccccccgccacggggccccgcgaggtgggagcccgggtggtcttcaccacaggctgtgcagacggtcaggcatcgaatgacctcgtcacgtccacctgcagcccagggcagtccaggaaaacgttctcgatgacggacgtatcccccggctctaaggtttcgcacgtcagccccacatggccaccaagcactggaaacgtggcccatgcgcctgtggaactgcatttttttttttttttgagacagggtgtgaccctgtggcccaggctggagtacaggagcacaatcgtagctcactgcagcctcggcctcctgggctcaaatgatcctcccgcctcagcctcccaaagtgttgggattacaggtgtgagccactgtgcccaggtaatcttaaagttttttgtagaggtggggggtttctctgtgttgcccgggctggtcttttaactcctgagctcaagcgatcctccacttcctgggttcaagtgattctcctgccttagctcccaagtagctgggattacaggcatgcaccaccacgcccaggtaatttttgtattttttgcagtgatgggattttgccatgttggtcaggctggtctcgaactcccgacctcaggtgatccgcccacctcggcctcccaaagtgctgggattacaggcgtgagccaccgcgcccggccacctccagaattttctcatcttcccaaactaaaactgtgcacatgacacactctgtcccctccctcctccccagccctgggaacccccatccccacccaactccccagtcccgggaacccccatcctacttccagtctctgacgactctagtgacctcctaggagtgacatcagtgtttgtccctttgggtctggcttgctttggccaagacaattttgaaaaaagtacatttggagagaaggggaagcactgtccccatcacacacacagtccgcggcctggggatctggggaccctgctgcacagaacagtgggcgcgttacagaccaccgaccgcccgagggtgaattacatcttaataaagctactgtgagagaaccacgtggctaggttaaacttgggcaggcgaggccttctgaaatcagacagtaagcaaacggggaagtagagccagatcccaaacgtctgtaagaggaactggccgcaaaccacagctgcacaagccagagaacaactccacaccctcacgggaagggaagagacagacacgctcacgccttacccaggagcacgaagtgggagggcagggcgagggcctggggagacactgacccctgaagccagcgcgaggagggcacacctgccaggctgacctcgtgtgcttggggtgaggca

SEQ ID NO: 40 - DNA, 137658 bp, Homo sapiens
  source 1..137658: mol_type = genomic DNA
caagaccattgatctgaccattgatctgtgcagaagatctctgaataaggtacccagagaaccctaggaatagaaacctgaaataagttttctaatcttaaggtcgctgagagcaaatacctttttcaattgattcataaaaacaactcagtctgatttcataaaattagcaagtgtgaataataaacattgaaaaaatatcaccttacctacgattattttttccagccattgtagtctttctatgttggctatgatttttacatagtccaaaattttcagggaaataacttattccagagcacacaagccttaagggcagttaatgtttagattaatttcgtgatacttagcatcccaaatagctgtttgtatttcttctataaaacaagtgaaaggggctagaaatctctaagaagtctgacagttctaaaacactgacttaaaattacttctatgattcggagatttgggtaggagaaggcatagaaataaatctagcatctgcgaacacacttgttaaatgtgctgaccaggtaaaagataacatcctttagttattttggttaaaaatgtctttgtttctcgtttttttttttctttaatagtaattataacgataatctgtttcctttttaaaagtataagacaaataaatgctcaaagtaaacaattccaataactcagaaggggccattccctggaaaggtcccgggaaaaacgagcgcttcctggcaagaagcaagcttcaaaaactgcctcggaaacgtggctgaagtcatcgcatttccaaacgcccaagccttggctggtccagggcagctggcgcggaagacccggaacgccctgtgggcagggccagctgcggacggagggacgggggctcaagggcgggtcgggtggggtcccgacgccccctcctcggctgggcgcaccccgggtgtccgcagggaggggcgatgttctgggggggggagcgtctgcccgacgccccctccctcaggtgagctcagcccgtgggggtccgcagaaagggcggtgctctgggagagggttagggtctgcccggcgcaccctccccaaggggcgcagctctgagccgggagcaggctctgcggggaggatccagatgttgggggcggggagggcactcggtctgcccagcgacccctcccgaagtgagcgcggcccggggtccgcggggcaggagatgatccgggggcgggagcctctgccgcgcgccccctcccacgcgtgcgcagcctgggccgggcgttgggcagcgggagggggcgcgggcggccacgtggcctcgaaggaatgcgcgggcgcgagggcagggcgctgccgagaaaccggcaggctctgcggccaatgggcgcccggaacggtctgggcccgccaatgacagcatggtgggtggagcaggccgtccgggcgggaggggctgggcgcatccctgtagccggcgggcgcgcgatccgggacggacggggtcgcgggggacgcgggggacgcgggggacggcggggaacggcgggggacggcggggaacagcgggggacggcggggaacagcgggggacggcggggaacagcaggggactgcgggtcgcgtcctggccgccgaggtgagtgcgggccccgcggaccgtgggtcccctcgcgggcttctggtttcctttgagagttgcacttctgcccggctcccccgaaatcgctgggtcccacccggaggtggctgcgcccccgaccccctgcgcagatgtttcagggaaggggctgagaccccctccccccgagcagctcccccttccgcggcgcccccggcccctcaggataacggcgcgggcctgggcggggggagcagggactggcagcagggacccctggccccaggggcaggagcgaactccgatcggcggaaggagcccgaggggcgagctggcttcgcctggggggtcgtgcagtaacttagattttccggtaaaggagaagaatgcggtccgcctcaggatgcagagaaggaccggtgtaaggaaagccggcgtctttcccccgcaccctacctgtccccctaccccaccagttccccgcaccccgtgtaccccgcctgtccctcagcaccccctgttcactctgcactccaccagttccccgcaccccagctgtccccccgcaccccacctgtttaccctgcaccccagctgtcccccgcgccgcagctgtcccccccacaccccacctattcccccgcaccccgcctgtccccccgcaccctacctgtttattctgcaccccacctgtcccctcgcaccccacctgttccccctgcaccccacctgtcttccccacaccccacctgtttactctgcaccccagctgtccccccacaccccaccagttccccgcaccccgtgtaccccgcctgtccctcagcaccccatgttaactctgcactccaccagttccccgcaccccacctgtcccctcgcaccccacctgtcctccccacaccccacctgtttactctgcaccccagctgtccccccacaccccacctgttcacccgcactccacctgtccccccgcactccacctgtccccccgcaccccacctgtcccccctgcacctcacctgtccccccgcaccccacctgtccccccgcaccccacctgtccccccgcactccacctgtccccccgcaccccacctgtccccccgcaccccacctgtccccccgcaccccacctgtcccccgcaccccacctgttcacctgcaccccacctgtccccccgcaccccacctgtctccccgtaccccacctgttcccccgcaccccacctgtcctcgcaccccacctctctccctgaaccccacctgtcccctgcacctcaactgtcctgcaccccacctgtccccctgatccccacctgtcctctgcacctcacctgtccccctacacctcacctgtttaccctgcaccccagctgtccctcgcaccccagctgtcccccccgtactccacctgttcccctgcaccccacagcccgctggtgcccaagaagccaaggtagattctgaggaaactgccctaggtccacagacgccctgcccacctgtcccagccccactccccttccatgggcccctgggcactgaaggtgaggtctgagtacccctcccgactgtggccagtaggtcatgttcccaggcagcagtagacgaacttgctgttgtctgatattgattccagtcactaactttggctgcaagtaaaaattctcattgactcaagatgtaacgggttttaattcttttctctggttaaccataacctgagtacggactggtcagtattctagattctgtgcaggagtgacttaatgtccatatgggtggaatgctgcaaggaggaacaatttcactgttgctgattaataatatgttttgaacacctgctttatagaaaataatttttattcgaaaagagagatgattactgaggtttacacgtcatgtatttttaaaaacacactttgtccctgtctgtctctcacagcatttatttgctggctttagcagccaacatcggcagttacggatgcataactctttatagacagatgagacctccaggatttctcagcagtaagaaaagtcatttgtataaggtgctatttgtaattcattagttgtagacagttgggggtgaagtgaagttaaaagttattcagaatagctttttatgtttttaaaagttgatgcttgacttccagatgtaaccacatttgtcttctgggtgctttggtgtgctgcctttcctctgcagtttgtgtgtgcatacgtgtgcgtgtgtctttgtgtatgtgtttgtgtttgtatgcatgtgtgtgcgtttgtgtgtgcgtgtgtttgtgtgtgtgctgtgtgtgtgtgcgctttgtgtgtgtgtgtgtgcgcgtgtgtgagttgtagatagaggcgttgggtggtgtggagggtgtggagttacagacctgggttgaggtggggaagcttttccctggccctgtgagtccagacttctcacgggacttgagggtgctcacttacgaagttgctagaaggcgttgtatggggaagtgctgcttaaaacaaagatgtttggcataaattagagcaaactggaaatgcgctaatgacggttgtattctgtaagcgatgtgaaaacgtcatagtgagatgtaagaaagcgctgttgtaggcccgtcattgtttactgcacagtgtgtggcaggaagcatgcaaagaacagctcggatctggagatgctcagagaatctgtgtttcatgcgtgcgttgcttatagtttgcctgggtagaaaggtaagtggcgtgaaataagacagaagggaagcgtagctgttagtcattcatgagggagaacttcagctctctcccttaaccaggctttctgggagtgtaattttggaaggttctgggagctctgcagtggaaaggggtgggccaggcccaggggctgccaagggtctgagaggcagggagagcagaggccggtgaccagcaggggtccttgcctgggtggcagacagggccacagccccaggtccgtctagggaggggcagggttacctgtaaggacaggtgtggcaaaggggcccagggagaatgccctgccaccagcccccacgctgatacacacacacttctgccacatctgccaccctactctgcttcagcctgttcatagttgtcaggtttggacattggttttggttctgtttgtttgttttctgtgagtagttttccaaattttgataaaaaagtgatctttttttttgaaatggagtatcactctgttgcccaggctggagtgcagtggagagattcggcttgctgcagtctttgcttcccaggttcaagcaattctcctgcctctgcctcccaagtagctgggattataagcacccaccaccgtgcccggctaatttttgtatttttagtagacgggttttgccatgttggccaggctggtcttgaactcccgacctcaagtgatccacctgcctcagcctcccaaagcgctgggattacaggcgtgagccactgcatgccccgtcaaaatgatcattttaaatcgtggatttttcctttccttccatcattgccatttcctgctttttgttgtatcattagagtaaagcaggcctgccagtagaaagtgctatatgggggttgttggtattttatatttttgttaaatgatgtgaaaaaggtgtaaaatatttttaaaaatgtttgggttcaaagtttttctcttccatgggtcacttctgataggggaaataactgtgtaaagtaaaatatggtatccagagctgtgactggtgcgggggcccttgtgagggagcgatggggaagcatgcaggttgttaacaggcacatgtagagatgcatggctgtctgcgtagaataggcctggctgcatcagcattggctagttaccaatctggccattctaggttccaatatcttaatgaccgtcagtccctggggactcacagtgggggtttaatgaagaaaacagaaggaatggttgtggtacctcaacactctgcctccactgatagctacagacagccgaggcccttttcggcaccaggtgagtcggggtgagtcaggctcctgcaagtcgtaggtgttgcttccgtgctgagatcacgttctttgttttgttttgtgcccgtggcttgttgtccagctgtggggaacagacccttacacttggatgtggtcgttattatgttgtggaagagcagtgccttcctcttaaagtgccttcctcccttaaaaccgtggcatgcacacttaacggttttaaggaattacattttgataaaccgtggcatgcacacttactgttttaaggaattacattttgataaaccgtggcatgcacacttactgttttaaggaattacattttgataaaccgtggcatgcacacttacggttttaaggaattacattttgataaaccgtggcatgcacacttactgttttaaggaattacattttgataaactgtggcatgcacacttcctgttttaaggaattacattttgataaaccgtggcatgcacacttaacggttttaaggaattacattttgataaaccgtggcatgcacacttactgttttaaggaattacattttgataaaccgtggcgtgcacacttaacggttttaaggaattacattttgataaaccgtggcatgcacacttactgttttaaggaattacattttgataaaccgtggcatgcacacttacggttttaaggaattacattttgataaactgtggcatgcgcacttactgttttattctatcgtttgcttattttttttttctgaaaggaaaataaagcagtgatttcagtgcagtgtctgattttctgtaaggaacatgagaaaagtgagtccaaagagcattacataagctagcgtggtattcagtgcgtatctgagcggacacggacggggagtcctcgagctttggagaggaagcaggcggcagggcctccagcacacctggggggcggccaaccagcccggccaggccgagcgctccccgcctgcacagttgcactcatgtcgggcctgagctgagtcgtcccgacaggatacctgcgtgggccgtgtagacacaacccagggagctccagagttaatgaccctcctggttcagaagctccgtatgttttgtgtgagaagcgctgagctgtgacggagggaatgcggtgggtcttcctgatggtgcgtgcagttctgagcctggcggggtcagcggcatggaaccagtgggacgtggtaaggccaggcctgtgggcggttgccctgtgtgggccgggccagcttgaagtccgctgagggctggagccagcccctgaccctggccagcctgcttgctgcaggagtgataagaaagtcgactcatgctttgttctcaagcacttgactcagcaggcccgtgggaagcagcccacacgagaggccctgacccacgtccagctgcctccacggaagccgcggcttcgtggctttctgtcgtttgtgtgggctctgcattcagccagcagaggcacttcttgcagagcagggctgaggagaattcctttctctggaagctgtggtcctgtgttatgtagaataggtcacttttcagctgcagctggagtctaaacgagcgtcataggtgcccagcgctgcacggcggcgcagcgctgcattcgtggtcccgaatccggggtctgcggaggaagaacgcgcggcgaggcccggggaggctgctgggacggcggcaggcaccctgctcctggaatggcgtttagacatgcaggtttctccatgatttaataggaaggaatgaaaggtgcagcgttttgccagctgatgaaaatatctggggagcgagtcataggtagcggtagcaagaaggagagggttaggttctccagtgtgcaggctccgaagtgctctctgccagccgtcagagggctgcagtttggaggcagctcccgcttgctctaaagagccacttccccgctccgttctgtctgcagacggccccagagggcaaggactcctggtgacaagaggagtatcagacgaaggcaggggagggaggctgtgtgcgcgcacctgtaatcctgggagatttccactgcaatccgcaggcatgcgtggcaggcggctcatttcccgtggggctcaggcggctcatttcccgtggggcccaggcggctgtccttggtgggcgcttgactcctgggcgtggcttctgtccagcatccaggctgccaggagcctccgggggccgtgcaaacacctgcgagcaccttcttggtcccttgaggcctttctctgttggcttaggtttagtgcccttttgtgcttatgtgttttttgaatcaagtttttatacttgatttaacttctataaaaagaaacaacctttgcacatgaagaaaatctacctgtggccatatgacaagcaccggcaaatctggaaatgacctattaagagacaggtgtttcatgaataccgctgcgtgctaagtactaagtgctctcacgccccaaggcagggtgtgaaccgcagagaccatgtgcttgccctggggggctggcacccttgtcttcaggaaagatgatttaagaagtaaagtaatatgatgaaaagctgcggaaagagaaggcatacacggggctacaaggtggagaaataaggcatacacggggctacaaggtgcggagaggagggatttgaaattgaataggagccatggcaggcgaggcgccaagagaatggggtcattgcctgaaatgccactggagccgagagatgagctgagcccacgtccacagaagcccattcccagtgggaggaacagcgtctgcgcggccctgaggtggtgcacccagcatgtccaggaacagcaggtcggccagggctggagggccgaaggcaagaggggactggtgaatgccagggcagcgggggaactgcatgggaagaagccttggaggctctgtgtgtcagagcggctggaagggccacgggccagacccatggagggacagtgtgggagagccacggaggggccatgtgacagagagctgtagcagacagggtgatggacatccatggagggacagtgtgtggcagccgtggagggacagtgtgacatccgtggagggacagtggcagccgtggagggacagtgtgacggctgtggagggacagtgtgacatccatggagggacagtggcagccatagagggacagtgtgacggccatggagggacagtgtgacatccatggagggacagtggcagccgtggagggacagtgtgtgatggctgtggagagacagtgtgacatctgtggagggacagtgtgacggccgtggagggacagtgtgacatccgtggagggacagtgtgacggccgtggagggacagtgtgacatccgtggagggacagtgtgacggccgtggagggacagtgtgacatccgtggagggacagtgtgacggccgtggagggacagtggcagccgtggaggggccgtgcacagtgagtggtgagcgagttgggacgcgaaggctgctctgtgctgctgggattgctggtgtcagcgcccactgcagagtcctgtgctgcggctcatgtactgctgtgcgggtcgtgcactgctcgctcctggacacctgcacagggtgctcctgatggagtcacttttcagtgtgttgactttcacgtcgatgacaggcagctttttctcattctcaccatgggatcctatggggctgtggccctgggtcaggagtgccctggagggtggcacatggccgggtggagttggatgggctcccttcccgcagctgcctgtggaaaccagcacgttggcaggaggggagggtggtgcccgagcctgtgggtgtggccgctggggactgggtgtggggacaggagtctgtggaatgcggtgcttcctcctgactgtggggctggaggagcagcggtgggtcgagggtggtttagtccacccagggggtcctgtggccccgctctgctggtgcctgtcgaaggggcagctgcagtcgaatcaccacgctgctccaagggagtctcccaagggctccaagggatggagcgtccgtagatgcccggaggagttgcggtgggcggggggcgcgttgtgtccaaggctgtgtcgagggtcatgtgcagccgcccttgctgtggacagagagacaggcagaggcagagacagagacagagggagagagagacagagacaggcagagacagagacagagacagaggcagaggcagagacagagagaggcagaggcagagacagagagagacagaggcagacagaggcagagacagagacagaggcagagacagaggcagagagagacacaggcagaggcagagacacaggcagagacagagacagaggtagagagacacagaggcagaggcagagacagagagagacagaggcagagacagaggcagagacagagacagagacaggcagaggcagagacagaggcagagagagacagaggcagaggcagagacagagagagacagaggcagagacagaggcagagacagagacagagagacaggcagaggcagagacagaggcagagagagacagaggcagaggcagaggcagagacagagacagaggcagagacagaggcagagacagagagagacagaggcagaggcagagacagaggcagagagagaggcagaggcagagacagaggcagagagagacagaggcagaggcagagacagagagacagaggcagacgcagagacagagagacagacagaggcagagacagaggcagagacagaagcagagacagaggcagaggcagatacagaggcagagagagacagagacagaggcagagacaggcagagagagacagaggcagagacaggcagagagagacagagacagaggcagagagagacagagacagaggcagagagacagagacagaggcagagagacagagacagaggcagagagagacagaggcagaggcagagacagaagcagagacagaggcagagacagaagcagagggaggcagagacagaagcagagacagaggcagaggcagaagcagagggatgcagagggagacaaagacagaggccgagacagaggcagaggcagagacagaggtagagacagaagcagagacagaggcagagacagaagcagagggagacagagacagaggcagagacagaggcagagagagacagaggcagagacagaggcaggtgcagcgacaggggcagagacagagacagaggcagagacagagacagagacagaggcaggggcagagacaggggcagaggcaggggcagagacaggggcaggctacagcccggggccttcagccgctgccactgcatccgccccaagcacggccctcacggctgcctctggctcttctttggcgccctgttaccgcctccaagcccccacccccaggatgctcaccatgctctctggtctcttcccagccctgggtcagccccctttccatgccaggccccgggcagtccccaggccgctgctgccctcatgcccggcccagcttgtttcctgaaccctttccagcaagcatctcctttcctgcagatcccggccccactgccttctttaggaagccctcctggccgctgacccccatccccagctccctgtgctgcttccctgggagggagtcttagctggcactgtgcacctcagcctccattgcgaccatgacccctccccaagtgtacggcacacagcattgttggggagccgtgtcggggctgctgggagccccccaatgaccactcctgctcgggggcactagaggagaggagacaagcagacacatgcagctccagccctcccggggaagggtaagcagggctgggctgcctgctgcgactgcagaggcctggggcacgcagctgtctggacaccaccctcacccatcggggtggactctcatggcacggacagttctgcctgggcaagtggatactgtggtggccggtccggggctgcttgtcccctccccagcatgtggcgcagagagggtcacacctgcttggggcccaggcgggttgattctgacccggttagctcgtgactgactgtgttataaagcccttgcgagactgaatgcatttgcttctcttttcactgttttttcttttctgggagcgtgcagaggaggggagaagatcccacggagacggtctcagtccgaggtgagcagagcgtaatggtgagaaggtagcagagctggagacacaggcccagggaggaccctggagagaggggctgctgggtgccatgcgccctgagactcagtcacagctgcgctctgaggccaaatccagatggtcacaaaacacaaacccaggacagtggggttctcccgagtcttagagaagaaggtctttcctccctccttccctccctctgtccgtccatccatcccctttccgtaagcattgagtgtcctcacagacctctggaaacattcagtggaaaggactggcgtgtttggcttgctgcggtgtttggttgagttaaccatgacattccagaaggactcctgccgtagactttgcgtccttttacgtttcctcctcgtggatttatgtcttgagttggaaccttatgaatgtgaaatcaatcgggtgcagaatgccggggccacaggggtttcctggctcccgtggtgcatcaggggtgggatgtccagagaccgcgcagccttggacaccggccacccagcagccggctcccggccccaagctcccggggtctgtccgcggggccacttcacccccaggtgggaggatggaggaaatggcccctgcatcattcgccaagcgggtccgccacaacgctctgagctcggctcggtcggggagtgctgggcgctgatggcccccggcccgtgtctgccaaggcactgggacatcccacgctcctgcattctgtggcgcagacacaggatgtgggtggttcagcctgccgcccccacctttgcagggccatggaggccggaggagtggacgataggaaaccgaccagggggcccaggatgctcgaggcccgagtgccggacagggctgagcagtaagtgaagagcggggcacttcacaggcacagagcctgtccctgccccaggtgcatctctgaaaccacgcggcagccctgtgagtcggtgccgtccctgtgcagctgaggccgtgggggtacaggcaggtcaagggcctgtgtggctgggaagtgctgggctggggcagatgcagacaggctcccggcacaggcttcagccctgccgcccctgcagctgtttcccaggtagaggccctgggtcatggtgacttcctcccacgcaggagtcagcatgacagctcatgctagcacgctcatgccgtcccgaagcactgactgtggaatggtgcctgtggaacgtccctgggtcttcggccagcgtccttcccaccctgctgctggatgggctcccctgacctccttttgcaggcctgggcacacggtgaacggcacagacagcacaattgcagcacaggtgcgggtgtgtccccacagtcacgctgaacagcgtcagggagcgcagtggctgtgctgtgtgtaaacacttatagaaggtggggctgcggcctgacgcacacggcatgaaacggtccttcagcctcggtgtctctgggctccctctctgactgaatgcatcatctttttgtttaaaaccacaatccaggccaggcgccgtggctcacacctgtaatcccggcactttgggaggccgaggcgggcagatcacgagctcaggagatcgagaccatcctggccaacatggtgaaaccccgtctctattaaaaatacaaaaaattagccaggcgtggtggcaggtgcctgaagtcccagctactcgggaggctgaggcaggagaatggcgtgaacccgggaggcagagcttgcagtgagccgagattgtgctactgcattccagcctgggcgacagagcaagactctgccatggaaaaaaaaaaaagaaaaaaaaaaacacaatccaaatgcacaatgaaatctttcattaagatgcttaaattggaaaatgacagcaatcatgaaacaaagcctgcagcccaggcaggtatgagctcatgctgcacgctcctggggatagagtgttttgaaagcggagtcttctgctctgcccccagggtccatctcacctgcaccagggcagggagagtgagccccagcccagccccaccattgaaaacgatgccggtgaggtccaggtgagtcacctgtggggagttgccagccacgtgggctgacgccggtggaagactgcacacagaagacaggctctagacccccgggcttcagggggtgggatgttttgtgtggcctggaggttctagggacacagatacttctcacagcaggtcggagttgggggagcaggctgtgggggggagaagcgcatgctgccgtgggctgtgtagggagcacaggcagctctgagtccagaaacaaaggcgtggtttctgtgtcagcccctgatatggtttggctgtgtccccacccaaatctcaacttgaattgtatctcccagaattcccatgtgttgtgggagggacccaaggggaggtaaccgaatcatcagggctggtctttcccgtgatattctcctgatagtgaataagtctcacgagatctgatgggtttatcaggggtttccacttttgcttcttcctcattttctcttgccgccgccacgtaagaagtgcctttcacctcccacaatgattctgaggcctccccagccatgtggaactataagtccaattaaagctctttttgtttccagtctcagatacatctttatcagcagcgtgaaagtggactgatacagcctcatagaaattttccttcttaggaatgcagtttttaagggacactaatttggaaggaaatttttggagtttacagtctgcctgagacttgtgtatgggtcaggatgccggtggtagggcaaggcctgggccagaatctgacagttgcttcccagagccaggggctgctgtgcgctgtgcggagccgcaggacggtcgggggcatgctctctgcacagggctgccctgcagacttgcagagctgatgcaggcagacgccatggtcggtgctgggtgaagtgtgagctgtcacccttaaaaagggccaggcatagaaaggagtaatgcccagtgttgttcatctttccgttggtcctaagattatcagtggaaaaatgagaaatcaatttgactcatttttatgcatttttgtagagaaacaaatagcatgaatgagatttacacagtgtggtttaaaaaatggagagtaaacaacagggcttaaggaaacagaattctcggaagacacacaaagccacgtggctgttaggtagagcgtgctggtgttgtgttcattcttgaacagacgcggcaggcgtacagctggccttgtctagggcgggaagggggaagagtgtgcttctggccctgccacttgctcaccacctttgagaacagagcgtgggttaccaggggagggcgctgattttctctgaagcccgaggctgcctggctcctcggctgcgtcgtattactaatgttgggcaggtgaatctgtgacctttgtttcttcagcagttgagaaactgagggataccacgttcctcatggtgagtcaaggtggtgaggactcggggtcgtggggacactgctcctcactctcacaggtgctctaggtttcctcacaggtgctcacagtttcctcctctgtctcccctcaggactgcagagttcaaaggggtttattcattgtctcctccatagagttcagggcgtttattcattgtctcctcttcgtatggtggatgcgtctttgtctgtcctgttccccgaggtcctggtgcaccgtggaaggaacagaccttgggctgggatccaccgggggtgccgggggtgcctggtgccttcctttctctaacaggcctggactccatctccagcgatcctgatgcgtgaggtggcattggccctggtgccagcgtcccagggaaagatgacatcaacctaaactcttgaggactcatagctgtattggagcattgttaattttctttgttgggagatgctccagccatggaacgtactcttcttccatccgtctctgaggctgcagagtcatccaggccaggctgacgaatgaaggagtcttctccttcccacagccacccggcacccgcccagcctggggagaagccatccctttctctgcactcagggcagcagtcagcgtctggtcctgctgctgtgtgcacgccggaggcagtcctcttcagacctcatgtgttcattccttcaaagagccacgcactcttcagcacagttggtgttggctgaatatttttgactgaggctaaagggtcattttgggttttgtcagggtctcagagccagtgtggtcctctctgtccatgggatccgattgtcggaagcattgatgccatctggcgtggaggccgtccaccgtggggactgtgcagcgtgggggccatctggcatgggggctgtctgatgtgggggacatccagcttggaagctgtctggcgtggatgccgtccagtgtggttgctgtctggcatggaagctgtctggtgtggggactgtccagcgtggaaggtgtctggagtggaaggtgtttgatgtggggaccatccagtgtggggctgtctggtgtgggggccatctggcatggaagctgtctggcgtggggactctctggcgtgggggccatctggcgtggatgccgtccgatgtggggactgtccagcgtggaagctgtctggtgtggaagctgtccgatatggggactgtctggtgtggaagctgtctggtgtggggagtgtctggtgtggggactgtctggtgtggaaactgtctggtatggggactgtccggtgtggggacagtctggtgtggggactgtctgatgtggggactgttttgtgtggggactgcctggtgtggaagctgtctggtgtggggactgtccgctgtgggtactgtctggtgtggaagctgtctggtgtgggtactgtccggtgtggggactgtctggtgtggggactgtctggtgtagggactgtctggtgtggggactgtctggtgtggaagctgtctggtgtgggactgtctgctgtggggactgtctgctgtggaagctgtctggtgtggggagtgtctggtgtggaagctgtctggtgtggggactgtctggtgtggaaactgtctggtgtggggactgtccggtgtggaagctgtccgatatggggactgtctggtgtggaagctgtctggtgtggggagtgtctggtgtggaagctgtctggtgtgggactgtctgctgtggggactgtctggtgtggaagctgtctggtgtggggactgtccgctgtgggtactgtctggtgtggaaactggtgtggggactgtccggtgtggggactgtctggtgtggggactgtccggtgtggaagctgtctggtgtggaagctgtctggtgtggggactgtctggtgtgggtactgtctggtgtggggactgtcttgtgtggaagctgtctggtgtggggactgtctggtgtggaagctgtctggtgtggggactgtctggtgtggaaactgtctggtgtggggactgtccggtgtggggactgtccggtgtggggactgtctggtgtggggactgtccggtgtggaagctgtctggtgtggaagctgtctggtgtggggactgtctggtgtggaagctgtccgatatggggactgtcctgtgtggaagctgtccgatatggggactgtctggtgtggaagctgtctggtgtggggactgtccggtgtggaatctgtccggtgtggggactgtcctgtgtggaagctgtctggtgtggggactgtccggtgtgcaagctgtccgatatggggactgtctggtgtggaagctgtccgatatggggactgtctggtgtggaagctgtctggtgtggggactgtccggtgtggaatctgtccggtgtggggactgtcctgtgtggaagctgtctggtgtggggactgtctggtgtggaagctgtccgatatggggactgtctggtgtggaagctgtccgatatggggactgtctggtgtggaagctgtctggtgtggggactgtctggtgtggaagctgtccggtgtggggactgtccggtgtggaagctgtccggtgtgggtactgtcctgtgtggaagctgtccggtgtggggactgtccggtgtggaatctgtccggtgtggggactgtccggtgtggaagctgtctgatatggggactgtctggtgtggaagctgtccgatatggggactgtctgatgtggaagctgtctggtttggggactgtccgacgtggggactgtccggtgtggggactgtccattgtttgctgcacttgtctttgaggtttcctcccatgagcgtcattccctacattcactgttgtggtccaagcatgtctgtctgaccttaacttggatatgacagctttccctccaaggataacatcctttgtcatcctgtggaatcactgctgggctggagagggtaggcacctcccgcctcacgggtgctgctggggtggagagggtgggcccctaccgcctcacgggtgcgctggccggcactcggaccctgtcttgctgcacagaaagctcacctgcaagggcacccgatgtggatcctgtgactccccacatattccaggtggagcgatgacctcacttgccccctctcccggccggtgggtggaagggcaaggacatgccgtcggggcctaggctgggctctgggtgctcgcatcagccacccgccctcagctgtagccttcgcgtcagccagctgccctctgctgtagccttgggtgagtgtctcaagtctcccaaccagtggtttctccattgaaaaataataacagtacctacgtcttggagttgcgctggcgaggtggacctaaaaggaaaaagctagggtaaaagtaatctatgtagaaggttatttgggtcacgtgtgaggcctgcagcccaggagcctggattcaggctgccctgaacgcacactgatgagcagcgcctccagggcgattttggaaagcagaaagggggtcagagaggcggatggaaagctgtttgtcaggaattctcattagtttatggaaaccattggtttattgattagtgatgcctgtgcattgttaagctacagagtgtgttacggtgtccagagcagcatcaccaggctctttcccagctaccgggggccacagtgggccatgttgagtgaacacgcggctccctgggggcagggagtagggagcagggcgtggttgtggctcgtctgctcatctctcggggcctgatgatgtgaaagggctcccatccctcaaaccgaagttccgctcttttctcagcagtcgtgttaacagatgagacaatcgcagctgctgctcgtggggagccccagtgcgtgttgagctactcgtgtgccatgttggtgaaatgacctgaaacctaggaactggggccgcggcgggaactggggccgcgacgggaactggggccgcggcgggaactggggccgcggcgggaactggggccgcggcgggaactggggccgcggcgggaactggggccgcggcgggaactggggccgcgaccggaactggggccgcgaccggaactggggccgcggcgggaactggggccgcggcgggaactggggccgcggcgggaactggggccgcggcgggaactggggccgcggcgggaactggggccgcggcgggaactggggccgcgaggcgccgaaccacgaggccaggtgctggggatggggcgggggtggtggcacgtggcaggcacctgagcaagtctgggggatggagggagagcaggttcagggctgggaatacaggaaggcagaagggcgggcactgggctgggaatacaggaggtgccgcatctgaggttgggggcagggtcccactgccatcctcattggaaagtagtgtctgtctgcttctgagagtgccagagccagtggccagctctctgcactaggataagggaattcgccggcctggtggcgtcctgggtgtgtgtcaggcagagcctggagctcttggcagcctgccatcccctcgcgttcccctcattgaatagtacgtgaggccggtgaccaccctgggcatgggcccgcctggcctcggaggagctggcctgtgggtgacactcagggaccatgccccctgtggtcccatgtgcttttcctgatgcggcgagggcctggagctggtgcctggtccccggtgctagagcctggtccctggcactggagccgaggcagctggagagttccctgaggacagcttatttcaccctggatggctctggcgggagccaggcccgtgttttgtggtcttaacacgagtcaccaggaactggccttcccgggactcgctggcatctagctcacactcaaactggtgtcctcgaagcagggagggaaacacgaagtgtagacaagaatcacaacagcaggcaggccgggacccagcctcgccccgagaggttagccacatgcttaccaaaaggagtggagagggccctaagcaccacgcctaatcccagctaagtctggaagaaaaaggagtggagagggccgtcagcgccgcacctgatcccagctaagtctggaagaaacccatttggtttacatgttgacttctccctttagaatacagtgggaaattcagcaaggagttaaagccagtgtcattttgggagggcctggctggcgaatccaatttgcaaaataaacttctggctacatttcaaggtgaagtcactccaacactgagaagtctcttttgttttgctcttgaatgttgtttcaagggagatttacaagtattcatgactaataggtggtgagtcttctaattatggctagtaatgacagttagctcttcctttttgcggggttctctgtcgacagccctacacctattgagtgcatgtttatccacctgaacggtgacaagcagtgtctctccttcttgcaggagctccttcccttaacagagctgagagaggcatctggagctgcagcatggaccagcgagagcccctgcctcccgctcctgcaggtaacagcactcagtaggtgggcctgtgggtcaggttgtgctgctgctctcatcaaggacggggtacttctggaaccactgaattgctggtcactggggtatggggtggagtgagagcttcttgggagaaagagaaggttctgacgtgagcctgggtgcccccatccttgccttgccacgggggcatcctgggtgagcctcttgcgttcctcacaggtgctgctgtattgctcttggggacctatggtcagcatctgaaattcccttaagattccccttagcctgatgcaatcggagatggagcgggagggttgttacagaatggcgccttccagtgttgaaggcctcgctcaggcttaaagctcagctcgcccatggcgggtgctcgcccagtttccttttctgcctccctcctctgagcggccgctcagggacaagcacgccctctctatccatatgctccaataagggagggcctgctgatgaaagatttatcttcattgtcacctcacctgagttaaattgttgccaaaaagactatgccagggttgccagctcgcgctccggccagtggagaaggtggacactgaccgacgtttccatggcaggtcgtctgcagggcctggagacctggcctaggtcctcccggggcctgccggaccacatgttgcacatgggcctggtgtccgttgcaggtctggggggtgatggagctgtggaggtcacggaattaactgtgtgggctccaggccccttggcactgtgggtgtgggtcttgggagatgctgggatttggtcgtctgtgccccccaactacgtggacactctgggccctcagagattgtagctggatcagaaaagaggcagcctggaagtcaggctgttcataagcaagtcagtcaccggggcctggtagatgacaaagacaggagaatccaggggtcaccggggcctggtagatgacagagacgggagaatccaggggtcaccggggcctgctggacgacagagacgggagaatccaggggtgagcagtggccaccccagaaacagccagcgacaccacaggggccagaagggatgcccactcctgctgccgggggtctgcggtggggaaccaggcctggaagtccagctcctggagttctccggagccgcaagaccacggggtacgggacccggtaccggaaacccgaggccacagctccactgcttctcttctgggggtgacgtcggccggtctccttgcctttttgtcgccatggtgctcgttgtcgccacagttcacttacgtgtggattgctggcattcaggctctgccagactaggttgttttaattgaaaatgaggtcgggcacctcagctcacacctgtaatgccagcactttgggagactgaggtgagtgaatcacttgagcccaggagtttgagaccagcctgggcaacgtagtgagaccccatatctgcaaaaagaataataatgtaataataattagttgtaatagttgtaataattagaccccatctctgcaaaaataatgatatgataataattagttatgcatgatggtgcatgcctgtagtcccagctactcatgaggctggggtgggaggttcacttgagcacgggaagttgaggctgcagtgagccgagatccttccactgaactccagcctgggtggtgggactgagaccctgtctaaaaaataaaggtggaacatgaggcagagagcaaaatcttttactgcttttcattcctatcaaatgagatgatgccccagcagagcagggcagtgggcgtcatcctgtggccttaccctccacgggcccactttgggcggctgtccctccaggggccccctcccgcctccctgctttctttttggcatttcttggaaatgagtggttgtcttggatagttttctgtttgaaggggtgagcaccagagcttgcgtgcttttctgttgcctcccctccttcccacacacatgtaagatggcacaccattaatatggtgccttgacatgctgaggaggcgggtacagttgttggggaaagttaaaaatgaaagaaaggccaggaagctgtctctgcaggtaagcgtggaggacgtaggacccgttcagaatcccgtggcagatggatgctgcctttcaccctgttttgccctctgtttcaaagaaggcggaaacaccgttttctcattaaatttatctccagcatttgctgacgtcgtcatcagtcctggctagtgcctggcaccctgaggagctctgcccagcggtaccaccacctggattgcatgaaatgcccatccacccatggtctccacgaccagaactggcttctgaagaaggttcctgggcccataggactccactttgtgtgtagttgtgctaatcagagatgtggcctctgatggaggcaggactgggggtgcccagggttccctgcagcaggacactcctctgctggggctgggggtgtctccatagcccctccctctgcccagatttcgacccaggggagagtatgacaggtccacgccctctgggtgcagctggactggccaggccgtccttgggccaaggctactggatccagcctcagggctggtcactagctccaggctgcaggaatgtggagctctccacagttcgccactgttaacatttcacccaggagggtgtcctcgggagaccctggcgggagcccgggagccgcggaggggctgaggagccgcccagccctctggcgggttgggagcgaggcccctgcccttgctgacaggccacatgaccttggtctttgatacagaaagccaccatttaatgacagtgctctggcttggaaacttaggtgagtttctagccaataacttttacgacaaatagaaatagggataatggcctggtgtcttttctgaggattctgtggtactttaattataatttcccccattattaagtcaaccgtccacttaaaagtgcccctgaagatcaggatccagcaggaagttactgcgacctcatttcttccctgcgtggggacacagttggtgctgttactttagatcatcacttttctggtttttttccccatatttcttttctacataattgtagtcattgaatataaatttttaactttttttttttgagacggagtctcgctctctcacccaggctggagtgaagtggtgtgatcttggctcactgcaacctccacttcccgggttcaaggattctcctgcctcagtctcctgagtagctgggattatagacacctgccaccatgcccagctaatttttgtatttttagtagagacagggtttcaccgtgttggccaggctggtctcgaactcctgacctcaagtgatctgcccacgttggcctccgaaagtgatgggatgacaggcgtgagccaccacatgtggcctgatttttaacattttgagtgtaggtttttataccgcgttaacatttgtgtttgtgagtattttcaggctgctgctcgtttttcgtaagtgtcctcctcagtggctgctcttggggcctcctggcaggggtgctgttgtgtgttccagtggaatcattctttagtccatgcccattcctcacctttaccaggtccctgtgccttctctagaaatgtctttggcaacacgtcaggtcatcacaaggggaagtggtgttggagaggcagcctgtgcaccaggaaagatttcaggctctgctgcccagctgctggggttcaaatgttgaccctgaggtgtgtgagctgatgacctaagcagccttcaatttctgtcattcctggaaaaaacagaacccctctcataagtttggggaggatttgacaagttagcatttatgaagtacttagacctagctggtaagcactcagcaaatccattcagaagatgatctgggatttctcagaatgcaaaacaagtcacactgccagctaaagcctttctctaattagtagcaaaattccaatgcaaattacattagggcaaaagaaataagtacaattggcatgttaatgttggttcacaaaaaatcatttaccaaatacctggtaacttccataatgagctcagacagacgccagcactcacactggcatcgtctctgggggcagctttgtttctgggggcagcattgtttctgggggatggcactgtttctggggaggcctccttcagcacaagcagctacaaaccgcagtgacacccagagccaagaagtggttatgaatagcctcttgtggctgaagctgtttgcagcctggtgctttttaaaggacttttctttaaacaatagagctaaaacacaaacagccttcattcaaaataagagaaaatcatatcccgagttaaaccttcatatgagaatcaaacatgctcttccaagccccaggaaaagtaacacttagcttttatctctgatcttaaaaaatgagtattactttaatcttgttctcagtgtgttaatcgttgcatgtctttaaaagttcttcatggacttggaacagtcagagcgctgtctgctcacgagggaaggtggcccgggaatgggtggcctgcttctccagggctggcggccagttctctcccactcagggtgctgggaccagagccaccaggtcttggtagcttgtagaataaatatttcgctaaagaaaacagaaaattgaagtgttctatgcgtcttcttttgcatcgtgcatattgtatttgtcgtcctctcttcagtatctctgtaaaaagaggtacgcggggtcctccgtcttagtcctcaggttaagtggctttgtacgcgccacacggcgtttcctacttgttgcaacatgccccagggagggattctttccattctgtgattcctttctatagacgagggatggggtctcgtggccagcaagcaaagtttgaactcagctctccgactccagaagccgttctctaatccacgactctgtacttagcatttcttgtgtagatttgtccgggggcttcagaataacacagcaggatgggagatgtgctgcgcagcgatgggtgtgtcgtggtttctgtttgttgtttattcagtgaatgttgtattcactattaaatgtattcactatgtaaatgtagggaagctacatttcaggtactacaaatgactttacagtttataatctaaattgggtaattaaaaaaattacaatgcatgttaattgtagaataaaaactaaaatatagacaagtcacgaaaaagaaaatacttcacctctgggagattagtactgttaaaattttattgaatattcttccagtgttttagaagtagtctttttttttccccttgaagcaaacttttaaatgccgttaatataagtgatagtatctgcatggttatgtttcaaacattagcagtttttttccctgacaaacctaggcagcacttgtttttatatgtatagtttatttaaagtgagagattaagtttttttatttatggctttattaagatataattcatatcttagtaccgtttacctatttaacttgtaaagctccgtggcttttactgtattcacaagcatgtaggaccatcacacagtcagtgctggtcacccctagacaccgctccccaccccgggcagagggtaactaaattttaaactaaacttagatactttatttgtacccttttgctcattaagaaaagagcacttaaaactaacttcaaattagaatagccaaaatccagaacacagatggtaaatgctgagaagggtgtggggcggctgcggggacacagacggcaaatgctgagaagggcgtagggcggccgtgtggacacagcaaatgccgaggagggcatggggcagccacgtggacacagacagcaaatgccgaggagggcatggggcggccacgtggacacagaaggcaaatgccgaggagggcgtgggccggccgcgtggacacagagggcaaatgctgaggagggcgtggggcggccacatggacacagacagcaaatgctgaggggggcgtggggcagccacgtggacacagggcaaatgctgaggagggcgtggggcggccacgtgggcatggacagcaaatgctgaggagggcgtggggccagctgcgtggacacagacggcaaatgctgaggagggcgtggggcagtcgtgtggacacagacggcaaatgctgaggagggcgtggggtggccacgtgggcatggatggcaaatgctgaggagggcatggggtggccacgtggtcacagacagcaaatgctgaggagggcgtggggcggccacgtggacatagagggcaaatgctgaggagggcgtgggccggctgcgtggacacagggcaaatgctgaggagggcttgggcggccacgtggacacagacagcaaatgctgaggagggcgtggggcgaccatgtggacacagagggcaaatgctgaggagggcgtgggccggctgcgtggacacagagggcaaatgctgaggagggcgtgggccggctgcatggacacagagggcaaatgctgaggagggcgtgggccggctgcatggacacagagggcaaatgctgaggagggcgtgggccggctgcgtggacacagagggcaaatgctgaggagggcgtgggccggctgcatggacacagagggcaaatgctgaggagggtgtggggcggccacgtggacacagagggcaaatgctgaggagggcgtggggcggccacatgggcatggatggcaaatgctaaggagggcgtggggcagtcgcgtggacacagacggcaaatgctgaggagggtgtggggcggccgcgtgggcatggacggcaaatgctgaggagggcgtggggcaaccgtgtggacagacggcaaatgccgaggagggtgtggggcggccgcgtgggcatggacggcaaatgctgaggagggtgtggggcaaccgcgtggacacagacggcaaatgctgaggagggtgtggggcaaccgcgtgggcatggacggcaagtgcggaagacggcatgggccacccgcgtggacacagatggcaaatgctgaggagggcgtggggcagctgcgtggacacagacggcaaatgctgaggagggccgggtgctggcgggtggctagagggcgtggggcagccgcgtgggagggcagtttggtggcttcttcaaacctgagcacactcttaccgtgtgacttgcagccatgccccggcgtatttatttaaatgagttgaaaacttaatgtccactcaatacctgcccatataggtgttgatagcagctttattcataattgccagaacccagaagcagccatgatgtccttcaggaggtgaatggatggataaactggggcccattcagacagtggaacattcagtgctaggaagaaatgagctgccaagccgtgaaaagacatggaggagccttaaatgcatcttactgagcgagagaagccaacctgaaaaggctgcgcccggtgcgattccaaccacgtgacattctagaaaacaaaattatacagtaacaagctcagggttgctaggggtttgcgggggggaggggtgacaggcggagcacgggatttttagggccacgaaattccttgataatggtgcatccatgtcattacacgcctgtccaaacccatagaaggcacagcaccaggagcgaggcctcacgcacaccgtgggctttagttagcgacgtacctcaacatcattacacgcctgtccaaacccatagaaggcacagcaccaggagcgaggcctcacgcacaccgtgggctttagttagcgacgtacctcagtgttggctcctcacacagaaggcacagcaccaggagcgaggcctcacgcacaccgtgggctttagttagtgacatacctcattgttggctcctcacacagaaggcacagcaccaggagcgaggcctaacacacaccgtgggctttagttagtgacgtacctcagtgttggcttctcagttgcaacaagtgttccactctggcaaaggatgggggatagtgttgggggaggctctctttgggggtggggagtatatgagaactctctgtaccttcctctcaattttcctgtgaacctaaaactgctctaaaaagttgtatctcttaaaagcaaccaaactggggtgggcacgttggctcttgcctgtaatcccagcactttgggaggccgaggcaggaggatcacttgagttcaggagtttgagaccagcctgggcaacatagtgccacctcgtctctattaaaaataataaaacttagccaggcgtggtggctcatgcctgtagtcctggctgcttgggaggctgaggtgggaggattgcttgagcccaggaggtcaaggctgcagtaagctgcgatcgcaatactgcactccagcgcgggcaacagagcatgactctgtctcaaaaaaaaaaaaaattaataaccaaatggaaatgaatctctgctgcagaccatatgaagacagacacaagcagaggggccctgtgggtgtggggacggctctcaggctcagacaggccgttagccgtcttgatagctcgagattcaggcctgcgaggtccactaggctcaggtgtctacaaaacttagaattgataagaattaaataacaacaacaactgaggctcttggtcacactggccaccccaagtgcaatagccatgtgtgacttgagctgtcctgcgggccctctagaacctctccatcatcctggagaggaccggggagcagcaccgtttctgtcctgagggccctctagaacctctccatcatcctggagaggaccggggagcagcaccgtttctgtcctgagggccctctagaacctctccatcatcctggagaggaccggggagcagcaccgtttctgtcctgagggccctctagaacctctccatcatcctggagaggaccggggagcagcaccgtttctgtcctgagggccctctagaacctctccatcatcctggagaggaccggggagcagcaccgtttctgtcctgagggccctctagaacctctccatcatcctggagagaacccgggagcagcaccttttctagcagcagcatttcgaagattggattgtcaggtaacttcctcgcccttttttgcatataggcataacttaaaatgggcatggtcatattatgtcataatgattggaaacgtaatgtttcttaaagttttctatttcataacttgttttagaaatgtgtgccttaattgatgagccaattacctgcatactcacaagtgtaaaaagtcaggttggtaagaagtcagtgccaccaaggcagccccaatggccctgctgtgacggaaacagtctgaatcctgaggcttaaatggctgctgctgtcggtcagcattaggggtgtcgtgtcaagctgccggtgacccacaagggctggcccctgaatgcagcagagcctgcagttttcctgggaagtgcagctgtggccagagggcagcctgtcctgggcaggccagaggagaggggcaggggaagaatggtccccaggttagatttgggccgggcgctggcgggtggttagatttgggccgggcactggcgggtggttagatttgggctggatgcctgtgggtcggcacgggctgcactgccgtctgtgtttcctcctccgtgtcatggccttcatgggtgactctcagaacctgccgtcctgagtgggcaggaggggcacagagcctctccctaggtgcagccctgcccaggccgcccttccctgcttccctgccagctgcctacccagagcgccgggcccttcccgcccacctcctgggctccacagggaccaacgggcggagaacactgggccatggtgtgtccagcgaatgacggctacactgcagattccccaacagctttttgaaagatccatgtcgtctcaaactacaacacgttgtatctcctgagatgctttcagcagcccttgagcatcttttctagtttgcaaattgtagtttttctcatcagtgttctccttcagctgaatggctgggttctgaagctggggttttgagaagcgggaattccttctgtggctgcagcaggagtgttgtgggaaccgacccagcccagcttgcctggctcccgccagggccctgaggatggcacaggaccttttgtgttggaaagggcttggccgagcttgcgggggagcctcctgggttgcaggccggaagtcccaggtcagggtgctggcaggctgtgtgtgctccccgggaatgtaggtcacagccttccttgcctcttccagcgcccgccggctgtgggcactcccgggagttcctgcagctgcactgccaggtggctcctcgtccctgtgctggcctctgctgtcatgaggacactgccacactgggttagccgagcctgctctagcacagcctcctgtaaaccaattgcacctgcagtcacctgtttgcagacgagctcaccagcagactgggggtgaggatttcagcacagggatttaggggacacaattgaacctgtcagggctggtgtcagaactaaacttaggaccccaaatgctgggatttttaaaggcattctgcattgcacttcactaagggacctggggagctcgggtggggtctgtgatgcccaggatcccccagggcccagggcagtgtctgggatggacatgctcagcacacaccaccttgaacgcccggccccatgctcacctcagagggcggcgcagcctcaccatcgatggaggcccccttggaggtgggggtcagaggagcagcccagctccaggcggcctcgccctctgtcctgggcgcccgccgtgggcacagctgtgggcacccatgcaggcaggggtgcagcctcaggtggttacattgagcacaacttctttgagttcttgtagaaaggctatttttttcttactggaactgaattctgagaggaatttgtaacacacatcattctgcagagtctatataacttgaaagtctttccctgcagtgtttgcagaggatggagggcagctccgccagtgtctgccagtctttcaatgacagcagagagctcttgaattccaagccccaagccccttccaagcccctccaagtctaaactaacaagatttaaacttttggaggaatttcttgattgctttgatttcccttgtatagtagaattctacttaaattttactaggggaaaaagtgagttattttggcaaaaaacagtttgaagcttgctcatctgctcgtcattctctcattcattcgctcacatgatgtgcgtgtcacacattgccgccaaccaggtttcccactgcaccttgctgggcggtgagcagaggtgccggctccgagaacgcatgcggttcttctcagggtcatacctgtacctggcacacgggacatgcactgtcccaggtaatcccaccggtctcccggggctggtgtcacagcccaggaggtggcgtatggggagggagtggaggggcctcggtgtctcctcagggctgtttcctgcacacacgggctcctgttcacggccttccttcctgaagactttaaagagaattccttcttcctgtatggggtacagtgtgggttccggtcccaacagctcatgtttctccccttgcagatatttgagagcctattttgtaccagacattgtcaagcttttttaaaaaacaatatttatagactcatgtctaggtgtattttatctaattgtttgagttcagcggtagtaaactataatttccaaaaaagagagttgacaatataaaaatctagtgtgattgtgtcaccgtctggatgaatctgaacatgtgcctggcagtgactttttttggggtggtcagaacagaaactttttttggggtgggggacaaggtgttgctctgtcccccaggctgcagtgcggtggcgcaatctcagctcactgcaacttccgcttactgggttcaggtgatcctcccacctcagccttcggagtaggtgggaccacaggtccacgccttcaccccaggctaatttttgtacctttttttttttttaagagacggggtttcactatgttgtccaggctggtctcaaattcctgggctcaagcaattagtcctccttggcctttgaaagtgctgggattacacgtgtgagcccctgcgcccagcaatacataaacattttcactgatcattttcgtcacggcatttagtcggcattgtttccgcagcacgtttatttggcaaacatgattttttctccccaaacgtgaattctgtggaaatgacagttgcatttggaaaatattccagaaaacagtttttttgtttgtttaactttttactttaaaaggtattcaccagttcatttccataaactgactacttaatgatatggcaaaaaaaaaaaccccttctgaaataggttttgtttacggtcgcttgggagacagtgaggactggtttgaaagtacatagttaacaaggctcaaactctggaaattagcggttctgtccattccagctctccccctgcttcgattgtttcatttgattaggcttaaattcaaaactttgaatttagagaagtctttgaccctctaggaagtgggtgaggctttggtatctgggcagagcagagttcaccatccagaaggacagcaacacacactcctatcagacgtatgttttaaaaataacacatttctgaatcctttttcttgattcaattttagtatttgtcattctcatacttgtaaaactcgtgagtgttggtggaagcagttccagaaagctcgtggggtccccaggtgtcatggtcagctgggggtctcatccccaccgtccttgcagtggtagctggatccagttcacgctgtcgtgggcctgggcccctctgtgtatttgtggtgacctaaaaatctgtttccttcaaaaggcactcctagaatgtatgactagtttaggagattcaaaggaaaatgaaacacctcaaatttaaaggttgtttttagaccgctagagttccccgggaggcgacttccccaggaggctcggcagagagcgcctggagactgcgtggagtgtaagtgggttgtgtgtctgtgggttgctccctagcagggctccccctcagccccctccggagctgcctgcagccgagctgggccgtcctgcttgggtgcatctccctggcccacgggggattgtctgtgttggaggggcttggtttgggctgacccaggctctgtcccgaggtgccacctgcttctgtggattgccgggcatggcagcaggaggtttcctcaggaacgtgtgctgggaagaaatcccagcccttgggaaaggctggcaggggctgggttcctctcgctcctgggtgtgccgggtggtgttgtcccagcacatgggtctcctctggaaaaaggagaagcacctgtctgctctgatggtggcacacagtcctagcacgccgtctctgcaaatgatgcacacggcaggctgcgccatcagccgtaaccccggtccaaggagacctgtgactcgcctcctgcaaaatgtttcttatcaagcacttacttggaacagttattaaccatgctctttaataattatggaggtttgtattttaagctatatatcggtgttcatatttgacactgattttctaaccatcagagatatttaattaaaattgtaaataagagaggcaaaatgaaaataaaaggagaagaattctagggagagatgcaaggtgtcagaagttatttctaaaagtaaagtggatgatactgaattctcttccagaccatcagcccagccgggtgatgttcatctgctgggtgcacagatttaaaatgtgaaaagctcttttttccccttactttctcttgttttcttttctttttttttttttttgagacagagttttgccctgtcacccaggctggagtgcaatggtgcaatctcggttcactgcaacctccgcctctcgggttcaagccattctcctgccccaccttcctgagaagctgggattacaggtgcccgccaacacgcctggctaatttttttatttttagtagagatggggtttcaccatgttggccaggctggtctcaagcttcttaccttgtgatctgcccaccttggcctcccaaagtgctgggattacagatgtgagctaccacccccagcctcttgtttcttctctgtgagttgtagatcctattaaaagaaaataaaaaccagtgactcagaattctaatgatacttattttgccccttaaaaaggttaactacaagcgcagtacagcacagaggaacttagtcagtgtctctggctaacatagatcgatcgatctatctatctatctatctatctatctatctatctatctatctatctctccttgatgtggttttggtttttctttttagaaaatgaaatgaaatatgataccaataataatgaagaggaagagggagaacagttcgattttgacagtggagatgaaatcccagaagcggacagacaggccccatccgcccctgagacaggaggtgctggagccagtgaagcccctgcacccacaggtgagtttccaggagggtccccaggtgagtccccaggtgggtccccaggtgagtccccaggtgggtccccatgtgagtcaccaggtgagttcccaggtgagtccccaggtgagtccccaggtgggtccccaggtgagtcccctggggggttcccaggtgagtccgcagatcaccggcatcagggtcacctgtgctcagccatcggactcgccgattttctccccattcttacggcccaattggaacattgtagggaaaggatgatttctaggagccagagagttatgatttcttcatgatgtacctgaaaggacttaatttaagattggctaagtttcttctctttgtactattttccataattttcaaccttttcactctacctttgtattttgcaaagaaaaagtattgctatttcccaataagaatgacctcatcattgtatcactagattaaaagaaatattcagaacatgtgggatgaagtagctgtagaggtttcgctttctaagtttggaggtgggttgggtgctttcattcgctgaccagagggactgctcaggtcaggcagtggtgggagagcctgcacagtgtttcttcctgtgtagcacccgcctctcagctcgcacggtgtttcttcaggtgtagtaccagcctctcagtttggcagcgttcctcttggctcgcacggtgtttcttcaggtgtagtaccagcctgtcagtttgcacagtgtttctctctgcttgcacggcatttctttgggtgcagcaccagcctctcggttgtttgcatgccgtttctttgtgcatagcacccacctcttggcttgtaccgtgtttctttgtgcgtagcaccagcctctcggttctttgcatggtttctttgtgcgtagcgccagcctctcggttgtttgcccggtgtttctttggccatagcacctgcctcttggttgtttgcacggtgtttctttgtgcatagtacccgcctctctgcttgcacggtgtttctttgtgcgcagcacgcgcctctctgcttacacggtgtttctttgtgcacagcaccagcctctcggttgtttgcccggtgtttctttggccatagcacctgcctctcggttgtttgcccggtgtttctttggccatagcacctgcctcttggttgtttgcatggtgtttctttgtgtgcagcacgcgcctctctgcttacacggtgtttctttgtgcatagcaccagcctctcggttgtttgcccggtgtttctttggccatagcacctgcctctcggttgtttgcacggtgtttctttgtgcgcagcacccgcctctctgcttacatggtgtttctttgtgcatagcaccagcctctcggttgtttgcacagtgtttctttggccatagcatcagcctctcggttgtttgcatggcgtttctttgtgcacagcacccgcctctcagcttgcatggtgtttctttgtgtgtagcaccagactcttggtgaggggagcagctgccctcctccggcagcttctccctgacttagctcatgggatgagcctcctgtagtgaccaggctgcatccgtctcacctgtgcccagaggtgatgctgggttccccatgtgtgagtgctccctccgaggccacctgatgacctgggaacgtctaggggtcctggcatgggatgatggtgggagctcatacctgcttcccacttgcgctccaggagggcatgcctgccatgcccttggtgatgtgtctgctgacaagtcctttctgcatccccaggaggtgaggatggagctggagcagaaaccaccccagtggcagagcctactaagctggtgctcccgatgaaagtcaacccatattctgtcatcgacatcacgccattccaggaggaccagccgcccacccccgtgcccagcgctgaggaggagaatgtgggtctccatgtgccctgcgggtacttggtgcctgtaccctgcggctatgcggtgccctccaacctgcccctcctgctgcccgcctactccagcccggtcatcatctgcgccacgtccctggacgaagaaggtactgctaccctcctctccacgcccccgaagtggcctgtggttccctcctctccacgcccccgaagtggcctgtggttccctcctctgcatgccccggatgtggcctgtggttccgtagagtccgggcctgaccttcccccctcctcctcctctccatgcccccgatgtggcctgtggttccgtagagtccgggcctaaccttcccccctcctcctcctctccatgcccccgatgtggcctgtggttccgtagagtctgggcctgaccttccctcctcctcctctccatgcccctgatgtggcctgtggttccgtagagtccgggcctgaccttccccctgcccccacccaggtcattagatgtttgtttacagagttggaaaatgagcccctagttcatcttcagtgacaggaacaccactgagggaaggccagggtgtatggtttggaaatttttgaaacaacgtctggtgccgaatgtgttgccccctcatgtctggggtgccttgaacttcaccccgatctctgattcccccaccagctgctcacgggagtgtgtgcagtttttggcctgtatgacttactgtgctagatgacagttaccgttatgtatgtcccgtgtcacctgcttgtctatagactcagactccctggggtcaaagcgtgtgtctcgctgtcttcattccagaggatggaggggtggtgggggtgggagaattgcctcaggggctccctgtttcccactcatgcttttcctcgccgggaagatgccgcaggatctcagcagagtcctcagtggaaggtcagagccacctggggcagcacaaagggctcagagtcggccactgaggacggtgttccctgtagccaggacatgctccgagcgaggactgtgggtgccctcgtgggtgcctcgctcacctccggtctctgtgtcctcagcgctgacagctccatttcgagtctgcttcctcctccacttagtgagaaggagtggccatgtgctctagaaggggcttggttggtggagcccgttctctgctgtccttacatggccctgccatgtgtagtcacgcaccagctgtgtctgcagagccacagggttctgctggaaggacagcgtgcagtccgtggctgcttcgactgcagcccaagggctggggcctcctgccggccctgctgtagggccaggcgccagggtgagggtaagcacataccctgcctctgtcttcaggagcgacccagtcgaggcgtctcagccgaagttttccttttttgcccagatctgtttctatgctgtctttcccaggaacgcgctgcaggattcccagggttcatgggatgttcctctaatggaagcccacagcctctacgcctgagacatgattcttattcctgtaaaggtttcagtggaagcagccttccctttccagttaataacagttgagaaaaaaaaatccttaaagaaaaatctcaattttggattttgggaaacacagaggtttcagaatagacggcctcctgtgcgttttcctgttgaagtcggccagagtcctcggaactcaccacggtctgcatgatccacgctgctgttgtcactctgtgaccgcggagcatgagaaccccctggaaatgagggcgtgcagagtgtaggattcttggctgaaggaaaatacgtttgttttaaagtgattttcttattttaaaatattatttgattatttaaaataattgcatatcatttaatttatttttaaaataacttagcatgaatttaaaacaatttgcttatttttgttctgtcaacctagagccagtaataaagccttgttctaataaagactattttaagtcccggagtagaggagcaggtggttctccggttgcgttttgatcattgaatgagggatgtgaacgcagacctccttcctgggaggtggaaaagcgtggatttggtgttaggcccggtccccagcctggcccacacttcctgcctggtggcactgctggcttttctgttccttgctctggagcctccctggggcggggcggccgcctggctctgcagggcttccccgggacgtacagcccagccaggatccccaggcctgcggtgggaggttgcagagccctgcctggagctcccagctggccaaactgggatgaccagattccgttatttttcctgcctaccgaaaccagctctcaaagacgtccacaggcaggtcctgctcttgtttacgcacgggctgttgtggccagaagcctctgggtgcgctgctgctcggagctgtttaggcgactccctggccagcgtgtctgcctccttctgaccttgacagactcagtttgcaccttaatttcccggaaggcggaggaaagaagagtttcctggggtggagccctgagagggctcatgtgtgtgctctggggatgggagtctgtgctcctggacacccccgtgggggagacatttctcaccgtgcagcgagattgctgctgggcagcacgtcctgcctttgtccctctgcaaaacacaagtaaaagctttgtggctctttgggtgtttcttttcctttttttcttcttctttttttttttttttttttttgagacagagtctcgctctgtcgctcaggctggagtacagtggcgggatctcggctcactgcaagctccgcctcccgggttcacaccgttctcctgcctcagcctcccaagtagctgggactacaggcgcccgccaccacgcccggctaattttttgtattttttttttagtagagacagggtttcaccatgttgaccaggatggacttgatctcctgacctcgtgatccgcccgcctcagcctccgaaagtgctgggattacaggcatgagccaccgcggccagctggatctttgggtgtttctttgaggcagtgtggcagtgtgggaagggcagtttttggagcaggcagattggatttcagatcctggccctgtgtctgccctgacacctgccactcaggaaggtggcccggaacactgaaccagcagatgcatgtgggatttgcagcgctacccgcagatccacccccccagcccctcgggcatctcgtgtctgttgctagtcagcatccagctgtgtggcagctcctggtgtgaccagggacctgttttcagggatgagacctccaagcaggttacatcgagctcagctgtctccgactttgagccaactgctgcggtttgaaaacggttgagaactgttgctcattccaaagataaattccctttagaaagtgtttcatggacagctgccagtgtggcgatgagcagcagccgctgagtgctgctggctctccttccccacatcattcttggtgccacgcggctgggcggtggcagattcgtcaagggaccacgtggcccgcacccacgcagtacagccatcacagactctggctggcttctgcccaggagccctccgaggtgggagggtctgcttcttctgcactggcgtctcaggctgtccttggatggtctaagttcgtaccccacctgtgtggaatgtttgggaaacctgcactgcggctttgctcacggctcaccgttcaccctggagagccacagacaggcagggaggaatcgtcaggcgggtcggactgcgcgtgtatttgcgtgtggagggatgtgagcgtgtgccagtgaaagctggtgtcacatgtcacaagcgtaaccactcctctcttgaacatcttttgagcgtgccaggcggatgccccttcaggccagtcacagccgtggctcctgtggacacatggagtgggagagaacatcccgtttctttctaactctagcctgatgcatctgggtgccggtcacagccgtggctcccatgcacatgtggagtgggagagaacatcccgtttctttctaactctagcctgatgcatttgggtgctggtgcagtttatttctggctgtttcacaagccctcagtagatcacattttattagattccagtcttgaatacattttatctaagagctaaaaatttttaagtttattaatcacccttatgctaagataagcctctgattgataggaaagtgtgaaaccatttttaagggtaaaaacatcaacttcatgagcatttttgtcaggcgtaaagcagcatcacatattttctttcccagcagaaacaccagaagtcacagaagatcgccagcccaattctctgagttccgaggagcctccaaccaggtatctgcatccgtcttcccacacctgctgaattcccgcctttctcctgaggagctggacgtggggatcctggtgtgtgtccctgcccgccatcctcagctctgcgcggcgggagctgtcccaaccccacctcctgcctcgggtccctcccaggcgagtgtccctggaaatgtagggtcaggacgagtggactgagggtctgataactgggtctgatttcaggcgtccaggtgtgtccaggcttggcccttgtcacggccctgctgttgctttccctcatttgcttttctcctttctatcatgaaggcggcctttgcagggtaaagcgtcccccgtgaaaccgcctgcaggcgggtggggtatctggggagcagcagccactagagcagtgctcttgccccagtttaaacagagttgtgccaccaggtaggtccagccacggttctccattagaaattgcagattttatgtaaaattaaaaattagtggtagcgtgttatcactggtgatctaaaatgtattgtgaaaaatatgtgcattgaaaataggaattattttgaagaaaatgtatatagaatgtagtgtgaggaaaaccttaaatgatcttcaaaaggatgaaatttttcaaacatagaaatagttatgaatagtttaaaatagtgtttctgtttgattcagattttcttttacctttttaggtaactttttgttttgatattattttaaactttaaaagtgcaagaatgctccttggtgatgtgataagttctcagagcagggggctgcatcctaatttcacaggtgcacagcacagcacacagggcgaccccagcacccatgaggccatcaccaggacatggggcatcccccagcacccagggggccgtcaccaggacacagggcatcccccagcacccatgaggccatcaccaggacacggggcatcccccagcacccagggggtggtcaccaggacatggggcatcccccagcacccagggggccatcaccagggcatggggcatcccccagcacccagggggccatcaccaggacacggggcatcccccagcacccatgaggccgtcaccaggacacagggcgtcccccggcacccagggggccgtcatcagggcatggggcatcccgcagcacccacagggccatcaccaggacacgggctctcttccctcatcctcaaggtcctgcaggtaccttggggcctgttagagcttttgcttgagaagtcgtcatcgtggggtgctctgcacggattatcacgtgattccgttagtgacccttcccataggaacattttccgaggccttccatacacgtctctgggtgctcactctgcttccggtcttggccttcccagcagtgtctctgcgctgccaccgggctcatccttgcacagctccccacaggacgcggtgtcgggacgactgatccctggtgcatctcatttgtcagcagtggtgcctctcatggggcgatgcttggtgtgtgcagtgagtctgacctcatcatccttccgagtggagcattcccgtagctacccattgcaaaggatgacaccgcagtccctgtgtgtgtgggactctggtggcccatgtgaccacccgctgggggcagagcaccatggtttatgctgggtggccttgcatctctttctcccactgacctgctcctggacatggagacggcccattgcccgctggcatctctcccacccagcgttgtgagcagggcctaagaggtcctcaaaggggtggctgaaaaaccagaagacagttcaggccttctagggcaaggaccgtattgcggctgtattgcccttgcccgtgttctgtgccgtgcgtaggccaaacatctggaatacttatttacagagttatgagtgaaagcttgaacttgggatgtcctataataatagctgggaaaatatgtgatttcctgtatagtaacatatatatatatattctgacacacacacacacacacacacacacactctgcagggcagttggcatcctagtgacttgggctgtgcctggatattctgactttatggtttgttttctttaagtgaagatcaagtcggtcgagaggacagcgcacttgcccgctgggccgcagacccggccaacacagcctggatggagagtaagttccccagctgcccacagccagaatcctcaccacgctccacagacgtcactgcggcggggccgggtccctgagtctcaggtcccatcagatctaaaactctaaaaagatgtttatttactgaaaatagtaacatgggctgactgtgcagaagtttccccgggttccctgaagctgtcacttcccgtgaggccaccccagctctccacgtccacgcactcactcttcctggtcgtttctttctagcacaggctttattattatggtaacagtgagatatgtgggtaacagaaactctgacctgcagccatggtcagccaccacccacacgcccaccctgcgcttgcctgtgattcccagggagatgcagtgtctggcacccgttttgaagagggggcgggtgggcctcccttttttttttttttttgtcccatacacactttattttacataacttggtgttttcttttatctaatcgtacaaatttaaatggggattcccgaataaatgttttgttaatttacctttggcagaaacaacagattccaaaacatttagtagcctcttatttatttgtaacttaaaaataagttctgtagcgtatttttccaaaacaatagcctgaagcaaatgtgcttgaaaagctaattggtaatgatctgattaatatcacagcttatttaagagaactattacttaaaggacagactagacatgtattttgacaaaaacacaatttttggtcacgtgaatgattcgtgtttagatttcaaaaacaggaaacatccaaaagtgcatcattttatttataatctcactccttgaaatgagagcagtctgcaacgtaaacagagcaaagaattccaaactctatttttatgtacatttaaacctgtaggattatgtcccgtctctgtgtggattaaagcgagcgcatttccaacacgcggctccagcttccgtacaattcagagtaaacctaaaggcattctttctccctttaagttggctgagccagcccccctccaggtggccagatctgcagtcccacctgcggcttcaaaggctgaaagatttttagctagatttacttgttttttttaatttttaaaggaaaagcaagattactttcctgattatgcctctcattatccactggctcactaatttctatgttactgtttcatatgatcaacttacaaggtagaaccatcttagttacctcctgattattaaactgcctcctggaagttttcattctggtttcaattatgacgttgttaaaacaaagatcttagtgtaattagatgattccgctgtgtgcctattaaagcaggatcgttacaggattaaattattgtcttggctgtttgctaacagttttatttccgaggtaaaatttgtctgatttttttctcattactcatttttattacccagatggcagtgaattggaataactatatttggaaatatgatctctaaactagcagtctctgaacattatctaagaggagtagaaatctttactgtggttgcagatagtaaatgctattaaaagaaagagcgtctgtaatactggagcttgacaacagcagcagataaggaattttcctgaatttttatttcctgctagtgtggggacaggagtggtggctggatgtcaggggagagttcgggtttgttggtctcattttctgtcttatgtggctgaggaagcggttgtctgtatgtttttgatgcagtcatatgtcatagtttggacgttctcttgcagggagggcaccgctagtcaatgagtggaacctcgatttaaaggtctttttatgaaacggattttcatgtgaagcgtgtaactcttacagatatttgagtaaacctcaggctcattgttggtgtcctgtgtggtcatctcatacagcacggttttgcttacagaacttgccttcttttttatgaaacggtttcactttcacagaaccccagtgttgcacgtgatacagattgagaaacactgtcctatatgtttagcattttgatacttgctactactttttactttcagtggcacaaaattatggtgtcattggtttattgggatggttttccattgtatccagcactgatgggctcttttcttatttctggaagtctgtgtgccaccgttgtatttttttgtgcgtcagaacgtcaacttcataagcttaaaatactcgtcagagagccatatagaagtgtgtaattgaacacaaaatcatagaataagtttgacctggaaaccataaaactccttcctagtgacattttacagctggtccatttaaagagacatccttcattcccaataaattattctgccctaaaaataatgcttatgctttggtaaggtgctgttagctaccttacagccctcattgtctactagttgggacaaagaacgaaaaagtaaaaaataaaaaaaaaactacccttataaaccaactttttgaataatcatgacatcatcggcgactgtggccctgtaaaatttaaattgcactaggttttgttggtcactgtttaaagtgtttctccccgtttattgcagatccagaggaagcaatttacgatgacgttccaagggaaaactcagactctgaaccaggtttgattttgtctggaattgatttgaggagattcagctcagcagcctttccctctggatgccaaagtgactatttagtggacggcccagacgttttctgtattcatgttttgtatgttgcttctagaatggcttattgatgtgtggtggaatattggtgtttgtgcacatatgtgtgtgtgcttataacccttgaaatagggcagtttaatcttacttatcccaagcaaacagaggagtaaaggtacagaaaatgccggcaaagaggtaggaaacacagaggctgagaagcagcaatgtatatcgaataaatgacatcagtgagaaagtagagagaatcaggcaaaggtaatagtcaaagaaataactaagaattctctacaattaaagaaaaacataaattctcagattttagacatagagattcaaagcaagatgaattacacgttgatccatacctaggccgatgcaatggaggccgcggagcaccaggcccagggtgaatctcccgagagcaactggagagaaaacatggctgcctacacaggaaccgctattccactgacccacaggctgggggcgggttctcaaagcgaagaaggacgtggctcttttaacctgagcggccacgtccagcaaagtacagtcctttagaaagggcgatgggccgcaggaggcagagcgggggagcttgctgcccatagaatctaaggaaatagttaatgatgcactcgctgcagggaagagcacactgaaccacggaggaggtgacaggggcccggagggagtggggagcccgggaagtgtcgggcgtgtggagagtcgataccagcaccgctcaagacagcgctgatagtgccgattgagtttcagatgcagccggagccccagccagtgccgactgaagaggagggtgaccgttcatgccgtgtgttctgaagttctgaagtcggcatttttcagggggaggatcttgttaccgattttttttttttttttttttttttttgctatggattggtccagtttgcgttttatgggtaactgctaagaaaataggaatagattattttaactttgaaaccagtagtgcaaaacccaatctggtaaatgcaagaaaatataaaataagaaagctttgcaaatcatatgagaaaagactgcaaaataagtacaaacatattggtacgcatagtaaagtgcatcctattgccagtaaaagaaatcctcagattggataaaatagcaaagctagccataaattcttgtgagagatacataagagtacagaagatttgtaagtaaatggatggaaaaagaaatataatgcaaattctaaccaaagtattgtcagtataactataataatacactaaatgttaagccataagcaaggaataattcatgaggaagatatataacagttctaaactcatatgcacctaacagcatagccttaagatatataagcaaaatataacaaggcttaatcagaaatatgtaaatacgctgttggggtgagagattttaagaaaactgtctctgctattgacagatcctggacataaaatcagtaaaccggccaggcacggtcgctcacgcctgtcatcccaacactttgggaggccaaggtggatggatcacttgaggtcgggagttcaagaccagccgggccaacatggtgaaaccccatctctactaaaaatacaaaaattagacaggcgtggtggcgggcgcctgtaattccagctacttgggaggctgaggcaggagaatcacttgaacccaggaagcggaggctgcagtgagtcgagattgtgccactgctctccagcctgggaaatgagtgaaaactctgtgtcaaaaaaaaaaaaaaaaaaaaaatcagtaaaccataaaagattagaacagcaatgtagtatgattgacttgaaggtcatatacagatctttgaagcaagtagttccagaatatgtatttttttaaacacatgaaatattttaaaaaattaactatatagtatgcctcaaaacaaatattaacaaatgccaaagaatggatgttcagaccttatttcctcataataactgaataaaatcagtaaaaaaaaatcaatacaaacatttagaaattaaaaatgatatactactctgtaactcatggtcaaagataaaatggaaatgaaaatattttgtcttgaataataataaaaacattacataaactatatgggatagattttaaagtctaaggaattatagacataatggcatatgttaataaaacagaatgggcgcggtggctcacacctgtaatcccagcactttgggaggccgagccgggtggatcatgaggtcaggagttcaagaccagcctggccaagatggtgaaaccccatctctactaaaagtacaaaaattagccgggcatgatggtaggcacctgtaattccagctactcgggtggctgagacagagaattacttgaacccgggaggtggaggttgcggtgagccgaggttgcaccactacactccagcctgggcaacagagcgagactccctctgaaaaaacaaaacaaaacaaacaacagagagcagtgaactgagtatccagccagctgcacgaaagagcagcagagtcaaaggaagtggcaggaaaaaaataatgggcaaggcaaaaatgatgaaataaaaatccaggaagcaacataaagtattaacaaaaccaaaggttggttctttaaaaatagtacaaaaatagacaagcctctggttatattaagatgacacagagaaagaggggagagggatggaagaaggaaggaaggaaaggaaggaaggaaaaagttgatcaagaggatgtaactgcagtagaaatttgtaaaaatcataagaggatgctataaataactttttatcaaaaagttagatgaaattaaaaattgccttgaagaatcaactatacccaaaataaaaaccatgaataaacctataatgatccaacataatgaatggtttgcttaactactgtgcagaacagcccaccaggctcagatgtttttatgctggggtttattgagccttcagggagcggacaaacccctcagtcgcatgcactgttccagtgaatagcagaagcaaggatgaggtgagaattagtttataatgttagcagaaacttgtaaactccctcacctgcgaaggttgatgctacatttccttccagaaatgtcaggaagttgaatccagcatgaccctaacaagtaagcaagagcctgttttaaccttttacattcatggcagcagttcaaggatcctttgagaagctcttgtaacacgatttccccaaattgatggacataaacccatatgcttatctcagcatgtgtttaaaaagcacttgctgagattcagtgaccatccaacattaaaaactgctgatagaaggaaactcacttagctgaattaaggacgtgttcttaaaatctaccgccaacgtaatggggaggagctcacggcgttcgttaatttattcattccgcaaatatgttttgggcagttacataccgaatagtagatggaggtgtgcctgctgtcatggagatagggtgatttcatcctgttgatcaggaaaactcctaggtgcttgcaggtaaatgtgccacaaagaaagtgaggaccaaaggttagttgatgtaaaaacaagtttgaaatgcattttggggtaatttatccggtcgcttcgggcattcctcgcggaaggcgtggtctggtgactcagaagccaacacactgcgggagtccagccgtcggccccctgccgtgtggcgaggcccagtgtgtcccctttgtaaggacagcacaagcaggagttaatggaccggccatccatagcggtggtggggcagggagccagtttccgaaagaaactcacgccgccgcaggagggccctgtgggatgctctgtgcagagctgttgtgcggaccgggagacgggaaagcctggtggctgcaggagggcaccgtgcagaagtatccagtaaaccacccacagcacggcagcagaaaaacgaggaaattatatgtgtgtatgtttataagaactcagaagcaatggtgagcaaaaagcaaaagcaagaggagaaagtcacagtgtgctggcatcaagttgcattgagaggagcccgcggggtagtgcacccgcatttcctcgttgcgttgagaggcgcccgcggggtagtgcacccgcatttcctcgtttgagaggcgcccgcggggtagtgcacccgcatttcctagttgccttgagaggtgccgcggggtagtgcacccgcatttcctagttgccttgagaggtgcccgcggggtagtgcacccgcatttcctagttgccttgagaggtgccgcggggtagtgcacccgcatttcctcgtttcattgagcggtgcccgcggggtagtgcactcgcatttcctagttgccttgagaggtgccgcggggtagtgcacccacatttcttcactcgtttagagttcggggctctcagaacacagggagaatatgggagaattccttactagatgttacagaggccacacagggccacttttttcttttttttttattgtgtcaggtatacgtaaatattcctttcggtcagttcagcacgtaggactgagtggcattaggtacgctcactgtacagccaatgcctccataggccactttttaaatacgcggggctaagggccaacgacaagattgtcatcgaggacaataagtcgatggcgctgcctggtcactggcttggtcagaaaacacatgccagggtgactggatttaacgttcaattttagaaccacaaatctgccagcccaggcattcaagaggaagtgagtaattcactgaattgatggttagcaagacccttcaaagtccttggaagttccgtgtttgctgggggtcacaacagcaattgcgtttctaaaacattgaaaaccacccgtttttcacacatctgaatagcctgagttctaacagacctaagtaaaggcgtccaaacgtgcctgatcctgtggctgggtcccaggagccttaacaaggcattgagagagctggattgattgattagactcttgccaactgctgtgcggaatacagaaaatgcagctccagctctcaaagggctgaaaatctaattgaggtgaaaaaggtaacatgtgtgaaaaccatgtctgtgtagacttgttttgtatggaccagaaaagttggaagtccagagatggatgcgaggaaataggggatggagtttccttataacctctggagggacagtccagatacataccggggtgtgtagcgggtggaggttctaagacaggctggaggaacagtgcagacacacaccagggtgtgtagggggtagaggttctaagacagtctggagggagagtgcagacacacaccggggtgtgtaagcagtggaggttctaagacaggctggaggaacagtggagacacacaccagggcgtgtagggggtagaggttctaagacaggctggaggaacagtggagacacacaccacggcgtgtagggggtagaggttctaagacagtctggtgggagagtgcagacacacccggggccgtgtagggggtacaggttctaagacagtctggtgggagagtgcagacacacacggggctgtgtcggggatagaggttctaagacagtctggtgggagagtgcagacacacaccagggcgtgtagggggtagaggttctaagacaggctggaggaacagtggagacacacaccacggcgtgtagggggtagaggttctaagacagtctggtgggagagtgcagacacacccggggccgtgtagggggtacaggttctaagacagtctggtgggagagtgcagacacacacggggctgtgtcggggatagaggttctaagacagtctggtgggagagtgcagacacacaccagggcgtgtagggggtggaggttctaagacaggctggaggaacagtggagacacacactggggagcgtaggggtgcttttctctgagtcccctagtacatggtagaggctgtagaccctccgctcttgggcacgtgggtaggctctcaggatgactcttggctcttgggcatgtgggtgagctctcaggatgatgcccagccccaaatttcaggcaattgtgcaaggacttgacccattcatccgctgagctgagttgctgagactgctgggtgcccgggtggtgatcattgtccgtggcacacagaacacactgcagcttctgcaaagtgagctcatttcacgcattttatggctttgccaggctgctgttgacctgccagaacttttaatcagacatttggaggacctgttttgtagtcagtggagaaatattacaaggatagggtaatttgaaatatctaaggattgtaagtgacaagttcatgtctaattttgcatttccagtgaaagcaagtgttggctttgaatgttacttatgtgctgagatgtgtatattcctcagtgcttaattactaaggatttttaaggccaagttttgttacagtgaatgactgtggatgcataaagaataaatttaatatttttaaggcatggagattatttgtatctaagaaaccaggtaaaataaagaaacatttatgcttgtgtgactgataaaagagttagagagacactcatattctgggagtttgaagaatgtcattttcattctctaaaagtcttgttagtgtcacagcattgaaaatttaaaaatccgtgtgtattttcttgctagtgctggtacttgaatatctgtatcatccacctatccatccacctacccatatttctataatccaccgtccatcgacatgcctatcatctgtccaccatttctctctgtctaattttcaaaacatcctgtaagtttatataaaggaagatttttcttcttgtgaagttctctaaggctgacaagttacctggcatgactgtggcggatgcccatagccaggtggtcctcggggtacagatggggcaggggcacttgtgagaaacacctgaagtgcttttccccagcctccccggccctgcccgggtggtggaggcgctgcacggtgccttccatggagcaagcccggggctccgcagggtcctcagcatgattcagatttccttccacccccagctctagatgatttggtaaaaccacaaacaggcacaaaacagcccacatggaattctaaagttttaatttcattttggaatttatgcactcagatgaaatgatttatgatgatgttgagaatggggatgaaggtggaaacagctccttggaatacggatggagttcgagtgaatttgaaagttacgaagagcagagtgactcggagtgcaagaatgggattcccaggtccttcctgcgcagcaaccacaaaaagcaagtacgtgttccctgcacatgtgagggatggttctctcgcgttaacacggacagggggctgtgaatatgattgtgatccacctagtacttcatagtgatttgttaagatgctgataagtagtttggggaaagcataagatattggcaaaggagaagacgtgtcttgtttcatatagttaagtatcgtcatggaaagatggagaaattaagcttctataatccacttaaaaggtcttaaatgagctcaccaccttgaataagaaagtagttattctctgaattgcttgtgttttaatgtattatgtgctttgcacgtagcaccgtttgcggaacactgaatagatgggatcggggttccctaagacacagcacatctgcactttgctttaagtgaggtttcaactttagcatgttcagcatgaaaaggaagacgtaaaaatagaagatgttaagggacaaaagcttctaaactgacctgtgacaatcctttcttttttctttttcttttttttgagatggagtctcgttctgtctcccaggctggagtgcaatggcgcaatctcagctcactgcaatctctgcctcccaggtttaagccattctcttgcctcagcctcccaagtagctgggattacaggtgcctgccatgactcctagctaattttcgtatttttattagagatggggtttccctatgttggccaggctagtctcgaatccctgacctcaggtgatctgcccacctcggcctcccaaagtgctgggattgcaggtgtgaaccaccacacccagccggatgatcctttcttacagggaatttttattttactttttttgtggaaaagtcttgagattagggtgtgaggtgggatgtcagagctgtaaggcgtgaattctggaattgggtggttgtgagtcatggaacccaggaaccattcagctgaggcacctcccaggtctcggtggtgccaggccgtgccaccggtgttttgttagagttttttttgactgtttgtaaaaggatagatttgtgctcatctacagtgatgtctgtgtactttctgtgtgaggctgagatggaagccacacgcagtccttgtctgaggctggcgagtcccgtgttactgatagagatggtgaacggatgcccgccatagtgacagttgtcgataaccggtgttatccctccggtcccctagtaacccccagtaagcggagatttcattcctggacctagctgccacgtccctatggtttacaagtgattatgggctgcctacaattctcatattctgtgaacctggctcgtgaaactcaaggagaatctactagatcttggcagtcagctcacctacccagtttcattcacaagttcttccaggaattagatcttttctgccaccgtcatcattacaactgcgatttaaacaaccgatgaagctgcaattgtagtttttcgggttttttttttctttgaaatggagtcttgcctgtcgctcaggctgaagtacaatggcgtgatctcggctcactgcaacctccacttcccagattcaagtaattctcctgcctcagcctctcaagtagctgggattataggcaccttccactaccagctaatttttgtatttttagtagagacggggtttcaccatattggccaggctggtctcgaactcctgacctcgtgatctgcctgcctcagccctccaaagtgctgggattacaggcatgagccactgcacccggcctgcaattgtagtttttaacagctgataactgaggtgatatttcgcttgctgtagctgagtcagacacttgatttaaactgagatttaagaagagtgctgggctctgacatcacagatggaggctcggtgtgtgcctcggagcgtgggttaaatgctcttcagtttcgccttcatggtgggctgtggacagaggggccaggccactgaggagccgagaggcattagtagtcactccttggtagtaattcaggagaccctgcccttgctttggagcgggcccgtatcccagaggagcccttgactgtctgggcagtgccagtggttcagcagccctccctgctgggcgaaggagctggggaaagccagcacacagtgggtttgtggtgcagaattacaacccgggagcgctgggctctgcatttccagcctctcctacacgtccatgttgccaggacagtggcctggaccgggggtgggaatactgtgtggggtgcagacagggcgcccgtgtgttaggcctgtccaggatggaagtgctgcaggcagcaccaagttttctcgttcaaagggtcacattttaaaaacgaccaaaataaaactatatgttgttcaaaagtcatctcaaaaaatctcgaattttgttaaaaacttcctaaagtgtctgtgacatgagaaatgccccgagacgagccagtggggcctcagccacgtgcatctgaagtgtctgtgaccacacggagaaggatccagggggtccccagtcccgtcagttagagagaaagtgatctcaggttggagacccttgaaaatccgtgctgccatccccaaaatatgtcactttcagtatagtttaaatacaagtatcttttgcttggatgccaacataaaaaatgattttatgtatttttatttattggataatttttattccaccaaaatgtaaacgaatgatttcacagatattttgtgtgcgtgcatttgctcctgtctagcacagagaagaccctagcctggtgtctggatagtgtctgtcttttgatgccatgtttagctcatttctgcatttatctctcttttttttttttggagacagggtcttactctgtctgccaggctggagggcagtggcaccatcacggctcactgcagcctccacttcccaggctcaagcaattcgcccacctcagcctcctaagtagctaggatcacaggcgcgcaccaccctacctggctaatttttgtaattttaatagagacagggtttcaccacgttgcccaggctggtcttgaactcctgagctcaattgatcctcccacctccgcctcctaaagtgctgggattacaggggtgagccactgcgcccagccaactatttgtgcatttatctctcaaggaccaactgggctagtaatggggactctcgcgtgtggtcccagaagcccccagccaggacaggcctgatgtgccactgcagacgctgccagcatcctctcaatgtaaaattgtcccaaagaaccaaaaagagcctttttgtgaaaagactgtgtctctttatgctgtagctttctcatgacctaacccgtttaaaggagcactatgagaaaaagatgagagatttgatggcaagcacggtgggcgtggtggagattcagcagctcaggcagaagcatgaactgaaggtagagtcttgcccccggccgctgcccccacttgccagccgggcagtaaagaaaaaccgcgcggctcggtcggtccttgctgtctcaacagcggttctcaaagggtggtccggggctcctggaatcccccgacgctttggggctcacgtggactctgagacgctctgtgcctttcactgtctccctcttacggggaacccaggaacattctggaggctccacagctgtggcctcaccgctggcggaatgccatctggctgtctactagagaggggtttccagaaacgcacaatgccactttctgtttgttttggaaaatacagcaatttttcatcaatgttatttaagataacatgtaataggttgattattttttaaatgaacatttataaaaatatccaaaatttttcagcgttttaacttcaaatgcagtaaatattgatacataaaaccctggtaaacaaaagccatttgggctctccataatttttaagagcgtccagggcccctgagaccggaatgcttgagaactgccggacctgagtgtcgtgacagtctgttctgagcgatgtcttttaaaagggcactgtcaagtactgtttcctgcaattggaccttttatcctgctggtattttgtgatcattcatatgtgttgaatggcactcactggaaagggatgtgcactccacacagcttctggagcagccggctcatccgccctgttgtgcttgggccatcagaagccacagccacagccgccccctgggagccgcgttaccccctcacatgcagcatctggctggctcccctgcagggtgtctgatgggacctgccggaggctgcaggcagtgtggcggggtttctgaggagtggagggcgccatcagaaccatgggaggggtgtgtgagctacatttggaggttttcacagacacggggagtgccctggctgaagcaggtgagggcactgtgggaagtgggaaaggaaggctggggaggcagccagggctgggcccagcacgctcgcttcccctggtgagaacacccctgtgtcagccctgagatccgggagtcctggccgaggctgtgacctggaacccggggtctcacctgctctggggctcagggagcatggcggccctccagtttgtcagtttgcagttctctgatactctgtccggggaccctgaacggcgctggctgaaaaccaagggttcacagcccaaatctggggttgagaaagagcaggatgtagacaggctgtgcaggacggaaacgcgcaggcgggcagggctgtctgcggcatcgggcgggaggcaggggacatgggtgcaggggccaaggaaatggcagcaggacatggtcccatgtggggttgggagatgcaggagcaggggagcccccgggggatgggggacagcattgcaagtgatggagatgggctggggcaggcgacgcgggtgtgaggccgtgcgtgttgtgtggtgttcatggtgaacgcttcaggaaggcagccctcaggcgtttggaagtccagggcaggcagacacggccagggctacagcgacgctgtctgcacgctggtgcccagcagccctgctcctcacgcggtggtgtgacccagatgaggagagcctggttctcagctgcactgctggtccctttgagaggtccctgggatggggacatcggttgtcccataagagatcatcttttaaagacgaaatcactcagcgtccagtggccagtacctcagatgttgggtttttaaggaataagaaatcagatggcaggagacgcctcagacgcccctgagtctaggcagccgtgagtgtccagcacagctctggccgaggaagtggaggcagggagccccaggccagggggacatggcttccgagtctgacatccgcagcgtgctgcaccccgaccctccctcaggtgtgtcccgtgcgtgtctgcagcatttgccagggtcttgcattcagccccgtggctggagctgggtccgtgtaaccatgcgtgtgaggcggccctgtcaacagctggccatgcccccacatggggtgcagtgggaagccccggggaggttaaaaggctgaactggagctgtgagcgtctgcagttagttgttttgccatttaattcgaggcgagttgtttgacatttgtgcatgttagtgactcacctgtgacccccacgtagctctttgtgtgagtggatcacatataataccataaatggggcagggaacatgtttcaccatgtccaggaagggctgtatttttaaggtctgttttttccttttttccaacaaacaaaaccaaaacaaaacctagcccagaactgcacgtgacacatgcgctcacaagaaccagactacttgacagtattcttttaaaacaggcaaatgaaagtcgcaggtgggttctgccgccgtcccgttctcacatctccctctccgtcgcagatgcagaagctcgtgaaggccgcgaaggacggcaccaaggacgggctggagaggaccagggcagccgtgaagaggggccgctccttcatcaggaccaagtctctcatcgcacagggtccgtgcctgcaggtcttcttgcggggaggacacggggttggggggggcggccacatcttgtggggaggactcggggtggggggcggccgcgcaggctcccacagccttagggagcaccagcctgctcagtgcttgggtctgaatcagccctgctgaccccagcctccccgtcctgcaggggtggcgttttagaccgagggcacccagcagcagagaatcattgagaatcattgagaatcactggctggacataggaagggctgtgcaggggcctctgtcactgtggattcttagtattggactctgtatttatagcacattggccctcctgggcatggtcccgcagggactgaggtcgtgagcgtcctgaactggcatttcaggaatcttttccttggtgaggggagatttggagtagacagctgaagttccaggtttttctaaacatctaacgaaggcgcagtggtctgtgcagttatgtgtggaaaaggcaggtggtgtggaggtgtcgtgcacggcggcaacaagcagcaggctggggtcatttaccgtccgaggagacttctcggagcctttgtgcacggatgtcctaaggtcgagttacgggagggtgactgagacttcactgtcatacaggggtcgctgtgactctgacctggcatttcctggttgtttctccagctttctaatgtgcctgtctggtgctaggacgtgggtagcatttgctaatatctgtacttggaagggactttgcagtcacgttgtccctcaaggaacggcctcggatacgatgtgtaattggtatgacatggtgtaactcaggaggccttttcctctttcagtcctaatgaagccctcggcatctcagacaaggtgggggtaagctgtcagcatccccgaggggtttatttggtgatggagacgggcaggtgcattctaataaaatgtgcagtagtatcatgccctgatgaggtgccatgaggtgctcagggcagcaaaggacagcctttgaggaggtggccatattacacagcccctggaaagcacaggcagctctgtccagtgaggagttgggatttggggccacattcactgcctcaaggagtgtgtctgccaccagcagcaaccccccaactggagcccagattccaggagctgatcacaactgcccacctggagcccatgccaggcccctgagccaggatttgcaggctggcagagtcccccgggactgggtgtgtgggacagtctgagaagcccggagtcagcccctgggagcaggtcatgctttgtctctggtttaggggtactcttttgcgggtcagttgtagagatgcggcagtttaataggcaaatccttggccgggcacggtggctcatgcctgtaatcccagcatttttggaggccgaggcgggcagatcacgaggtcaggagatcaagaccatcctggctaacacggtgaaaccccgtctctactaaaaatacaaaaaaaaattagctgggcgtggtggcgggtgcctgtagtcccagctactcaggaggctgaggcaggagaatggcgtgaacccgggaggcggagcttgcagtgagccgagattgcgccactgcactccagcctgggcgacagagcaagagtccatctcaagaaaaaaaaaaaaaagggcaaatccctaacctcccaacccgagtttcctaagccataaaatgagaggcttggacagaatttcgttcttcgtcctggttgtacctaagaattaactagaaagcttttaaaacaggctggtgccaggccctccttccctggctgatccgttgatctctgagggaaaagtctgggcatcagtaggttttaaagccccttagatagatgtttctgtgcagccagggtttgggatctttgaactagaaaaactcaggtttctatcatctaaaagtgcctgtgcttttctgatttccagccattttgtggatgctttaatgtagttagctgtgttttaaaaaaatgaatgtaggcgttttcttgttttttagagacagggtctcactctgtcgcccaggctggagtgcagtggcacgaccacagctcactgcagcctccacctcctgggttcaggcgatcctcctgcctcagcctcctcactagctgggagtacaggtgctcacaaccatgcctggctaatttttaaattttttgtagagatggagtcttgctatgttgcccaggctggtcttgagctcctaggctcaagcgattctaccatctcggtctcccaaagtgctgggattaggggagtgagccaccccacccaactgtgaatttagtttttgtttaaactgttttgagttttggaaagctgtgcttcttaaggcatccagtgagagagacagaagaaatatactaagtgccacctcagttttcaatgacttttgactcacctcagttttcaatgactgttcttagccattcttagctgtgtttccttgtttctgattgtgatattttatagattaagaaactaaaatatttaatttaggaaatattctaaaacactaagattccaaaatattgccactttgctatctagctattcaaatggcacttctcctttttgaagttaaactttaaatactgaaaattttaaatacagacaaatattgtattaccctctggaaagaatattttattggatttgttaaaaattcaacttaataatagctgggtgtcaagtaagcatggaaaattgaaaggtctacacaaaatatttatttgacttttttttactgtactgtagtgttgtgaatatattatttgaatgtaaaattcatgcattttgactttttttttaagatcacagatcttctcttgaggaagaacagaatttgttcattgatgttgactgcaagcacccggaagccatcttgaccccgatgcccgagggtttatctcagcagcaggtgagatgagcagagctgacaggggctgttgaccagcagagctgtgctagtttttaaatatttgtgtgtttgatgctggttggtaaatatttgctgtctcaaactctgcatccactcgggccctccactgtaggttcctggcccagcacttagaggcttactgctgggctcagcaagggtctggggggacgctggtcagcagctgtggcctggactcaggcccttctggtccttaaatattttggacagcacccctgcccctgagtgtagctgtgagaaaggggaggaacttgcattcttcgtgggagtcagtcacacagtttttactttcacagagacagagtgtgggtttgtatggtcagtatgtgtatgtagctacctgagactgagatgaaaatgacagattttcagtaactaattaaatctgaatataatgcatttcttaaaaatctgatactcagtagcagaagggaaaaaatcagtggttttcattggattgtcttagggtaaaaggaagagaaaacttgaggaaccagagtgacagcaccaagtttgcaggcctttagcagcaggggctgatactttgggatgatgggagttgtttcccacatgggcagcgaggtgcaaatcatggacaccaggatggataggcagacatatgtgtaatccacggatctggggagatccctgatacaggtaggcagatagagcaagagagagcattgtcagattaaagacaaacaacacagaaatgcttagtgactggccaggtttaaaaagagatgaaaagggatacctgcgagctgttcataattgaccaggctgaaataggaagcttacatttcagtggaattgaacagcgatgactgaagtattagttttgtcagcagcatcacacgagtgacgggatggagtgtcaacagagcttggagacagttgttgaggagctgtcactcatgggtgtgcatgctctgtgcaggccccgtgcccggtccctggtgtgtttcactgcatttcatccttgcaaatcccgttgccatccttgtgtactctgtaaggaagcctggactcggaggaggctgatcatcagaactgcatcctccagctatgcgaggaaggggtcgtgtctgatctcagtctctcccatcgcagcctgctcctaacctgtctgtgctcactggggccatgtgatctgggctgccacacgtccaggggggtggttgacagcctttaccaggaacagaggatctagcgctttctcctgtgcatgctgtccagctcacccacctcacttcatgctcaggagttataaaaggggttcatggctgaacaccttcttgccagtcctatgaggcgctcaataggatgacacgctggccagtcctctactatctggggccctcactgcatgtggggtacctattctggtgaggacacaccatgtgagaggaacttggatcctgcactctgagaacttactgtagcgatgaagccgaaaaccaaaaatagcaaaagaagggaaaagcacaggggaaatgcttcctagcagatgagggactaaacaggaatcataacaggagtgtgagtgactcaggaccagaagagtcaggagaccttgaggacacatggcccaagccaagacagcggcctgagctgaagaccagtgggcaggatgcgggggtgagtgtgaaagaggcgatgccagaccctgagtggggtgtgaggggtctgtgaggagatactgagtggggtgtgaggggtctgtgaggagacactgagtggggtgtgaggggtctgtgaggagaccctgagtggggtgagggatacgtgaggaaacactgagttgggtgaggagtctgtgaggagactgagtgaggtgaggggtctgtgagaagtccctgagcaggtgagggttgtgaggagactgtgagtgagctgagagtctgtgaggagacactgagtgcaatgtgaggggtctgtgaggagacagtgagtgggatgagggtttgtgagaagacgctagatgggatgagggttttgaggagacacggagtggggtgagggttgtgatgagacagtgagtggagtaagggttgtggggagatgctgaggagaggtgaaagttctgaggagacactgagtgggatgtgaggggtctgtggggagtcaccaagtgccgtgagagttgcaaggaaacacggagtggggtgcgggtcatcaggagacagtgattggggtgaggggtctgtgatgagacactgtgagtggggtgagagttgtgaagagacagtgagtggggtgagctttgttaggaggcactgagtagggtgagggttgttaggagacagtgagtgggatgagggtttatgaggagacactaggtagggtgaatgttttgaggagacacttagtggggtgagggtttgcgaggagacacttagtggggcgagggttgcgaggagacagtgagtggggtgagggtttgcgaggagacacttagtggggcgagggttgcgaggagacagtgagtgtggtgagggttgcgaggagatgctgagtggggctgtaggttctgaggaggggtggggtgagggtttgtgaggatatgctgagtgggatgttgactgtgaggagacactgagtggggtgagggttgtgaggagatactgaggtgatagttttgaggagacagtggggtgagagttgtgaggagacactgagtgtggagggctgtgaggaggcactgagtggggtgaggggtattgaggagacactgagtggggtaagaagtctgtggagatactgagtggggtgaggggtctgtgaggagacgctgagtggggtgaggtatggggagacactgagtggggtgtgaggggtctgtgaggtgtcactgagtgtggtgaggtttgtgaggaaacacagagtgtggtaagggtcctgaggaaacactgagttgggtgagggtttgtgaggagacactgaatagggtgaggtttgtgaggagacactgaatagggtgaggtttgtgaggagacactgaatagggtgaggtttgtgaggagacactgagtggggtgagtattgtgaggagacactgagtggggtgagagttatgaggagacactgaatagggtgaggtttgtgaggagacactgagtggggtgagagttatgaggagacactgagttgggtgagggttgtgaggagacagtggggtgaggggtctgtgacgagacactgagtggggtgaggggtctgcgaggagacactgaggtgtgaggggtctacaaggagtcacggagtgcagtgagagttgtgaggaaacatggagtggggtgcgggtcatgaggagacagtgattggggtgaggggtccgtgaggagacactgagtggggtgtgaggggtctgtgaggagacactgtgagtggggtgagggttgtgaggagacgctgagttggggggttgtgaggagagcgtggggtgaggtttattaggagacactgaatggggtgagggttgtgaggagacattgagtgggatgagaggtgtgaggagacactgaatgtggtgagggtttgtgaggagatactgcatggggtgagctttcttaggagacactgagtgggtaagagttgtgaggagacactgagtggggtgaggggtatgtgaggagacagtgatgtgaggcatctgtgaggagacactgagtggggtgaggggtctgtgaggagacactgagtggggtgaggggtctgtgaggagacactgagtggggtgaggggtctgtgaggagacactgagtggggtgaggggtattgaggagacactgagtagggtaaggagtctgtgtggagacactgagtggggtgaggggtttgtgaggagacactgagtgtgggtgaggggtctgtgaggagtcatggagtgtggtgtgagttgtgagaaaactcggagtggggtgagggtcgtgaggaaacagtggggtgaaggtttgtgaggagaccctgagtggagtgagggttgcgaggagacattgagtgggatgagggttgtgaggagacactgagtggggtgagggttgtgagcagacacttcatgggaggagggtttgtgagaagacactaggtggggtgaggtttgtgaggagacactgagtgtggtgagggtttgtgaggagacactgcatggggtgaactttgttaggaggcagtgagtggggcgagggttgtgaggagacactgagtgggggaggggtatgtgaggagacactgagtgatgtgagcaatctgtgaggagacactgagtgcggtgaggggtattgagacactgagtggggtaaggagtctgtgcggagacaccgagtgtggtgtgaggggtctgtgaggagtcaccgagtgccgtgtgagttgtgagaaaacggagtggggtgagggtttgtgaggagacactgagtggggtgagggtttgtgaggagacactgaatagggtgagggttgtgaagagacactgagtggggtgagggtttgtgaggaggcactgagggttgtggattgtgaggagacattgagtggggtgagggttctgaggagacactgatggggtgagggttgtgagcagatactgagtggggtgagagttgtgaggatacactgagttgggtgaggagtctgtgaggagacactgaattgggtgagggttgtgagaagacactgaatgggttgaggttgtgaggagacagtgagtggggtgagtgttgtgaggagacactgagtggggtgagggttgtgaggagattctgagtggggcgagacgggtctctgaggagacactgagtggggtgagagttttgaggagtcactgagtgtgtaagggtctgtgaggagacactgagtttggcgaaggttatgaagagacactgagtgcagtgagggttgtgaggagacactaagtggggtgtgaggggtctgtgaggagacactgagtgggtcacggggtccgtggggtgtcactgggtaagagtcgaggttctgtgaagagagagtgagtagtgattggtaggggtgtgtgcacatatcagaggaaagaggtttgacctttttgttgtatggcacttttccaagggcctgtctgttgggtactgattttggtggatttgctcagcgaattggcagtgactgttcattgttttatggtttctgtaaagggtttaagcttcccaaattagtctcacagacctggatgaaattctgttttttgctctgattatctcagttacttttgtctagtagttaatttctgaagttcagttttccttttctttgaagggtggattttaatgtctatttccatcttgcttatcccaccgtaatggttcagtgaagtcctgtatagcaaggtctctgtgttgtgttagcacagtgccgtcactttcaatgagatgatagctgggattacgattagaaacttagcagtatttaggatttctgcattctttcatgcagctttctttattgtagtcatgattcacatcgattttgttttcctcctgccaaatgtgttgtccatgagagttttctcttgagtggttaaatggggggtattgatgctctttaattcttgttctcctctagaattgaattaagggaaacataactctaaaatgctgtatattaaacattctttgcatgcctaatttgggggtggaaaaaggcaaatgttctttttgaaataaagaagggtcgttctttacttggaaagtacccttgatgctggaggacagaggatcctgtcccgtccccattcccggtgaggacatgaggaaggtcaggctgggccaggcccaggcaccatccgcagctctcccagctcaggcctaggagcctctctgattgtcctccagccctggctttgtccagttgccccatgaccttcatgccagggaccctccctgtgggggctgcattcaggatggatttctcctctatgactttaggtcaggcttctcaggaagagagtgacactcttcctgagcactggaggctccctgtcccaccccttagtgggcatataatttgacgtgtcagattgagctgccagaaagactgacatcacgtgcagtagccatgaaacccagaatattggttttgtttttgtattttaatattatacctattccagatcttttgacctgatactatattagtatcttctcaggactttaaaaaatatacatacataatatatatacacatataaataatacatatacataatataggtacacatatcaataatatatatagtataatatataacatattatatatattacatgtatatatacacaaatacatttttatgtttgacccccacaactgtgactcaggagccttgggagagtgtttgggaatctgaatttcagaagaaagactggcctgggtttgatgatgggaggggttgcttggcctttgggttctaagctctcgtttgaaagggaagcctctgtgctctgacgtttcctgtgaatcagtcagtagcagcagctgcagcttcccagcttctggctctgtgtgtgtgtgtgtgtgtgtgtgtgtgtgtgtgtgtgtgtgtgtgtgtgtttaatcccagcgatacctgtattttttaaatacattagtatttttttaatacatcagtttcttctttgggtattttagaagggttgatttttgtcttttgcgaatagaataatcctttctctaaaaggagtaatctctccattgttaatcaggttttgtaaatcttggttgccctgcaatctttttaaccagagaaatttccgttgtgaaaaatgctctttgcccgctaggtggcaacgcagtcccttcaaatagcataatccagggctgcaggtagcctgatgctacactggagtacccgtgtgtgtgcatgtgtgtgtgtggtgtgcttccgtgcgcgcacgtgtgtgttatcttgcacatatatggggtgggtgtgtacaggagtgtgtgtggtgtggtgtgcccgggcgtgtgttcatatgcgggagtgcgcatgctggtttaggagaaactctattgccctgttttgctctgttttccatgaattggcaaattggaagtacaatgatcactagctggactgtgtttagaatgagggaaatgccgggcgtcctcataggcctttcacgggatcttacagccacaagtctattgtatgtgcttcagtgatgaaaagcaagatggaaaataacgtcaggttttgattgcaaacatgtcagattgtagagattttttttttgcacctctaagtgacatgaataatttactgtccacattcttggcctcataggtagatctttggatggttgaaagatctttgcaaaaaaaaaaaaaaaaaaaagattcctccacattccacaaactttgttttcttagaactttggaataaatattttagataagtgttgctaataacattcattgatcaagactggaactattttttatcctgaattcataggaagtatcatctacctgaatgttggatacataaaatacaatctgttaattcagtatattatcgttgcataaatgaaggaatttcttttcagtgctgtaattttttttgtcccagctgtagttatagttcatagtttgaggtttaagacattatataattgtattaatggggcgaagtatgttttgtacctgtaatgttatttaattaggctacccttgtgcactgttttctaaaaatagaaaagttacttatcagcaagcctcagcatagaagtaaaatgtatctgtgtgtattataaagcagttttctatcattgtacttccaaatttccaacaggttgtaagaagatatatactgggttcagttgtcgacagtgaaaagaactacgtagatgctcttaagaggattttggaggtacttaagtgtcgtgttacataatacatacatttctattattcttttttacctatatacattttgatccataaatgcaaagcatatatgtttatgaaacataacatgcaaatttgcaaaattctcaaaaggatctaagtattatgtctgtatattgacatcaaaagtcatgatttatgttgaaataaatataatttatgtaagtgaatatttacattcatttatctaagctttaaaaatgtctgggccaggctcggtggctcacccctgtaatcctagcactttgggaggctgagtcaggtggattgcctgagctcaggagttcgagaccagcctgggcaacacagtgactctccatctctactaaaatacaaaatattagccgggtgtggcggtatgtgcctatggtcccagctactcgggaggctgaggcaggagaattgcttgaacccgggaggcagaggttgcagtgagctgagatcatgccattgcactctagcacgggtgacagactgagactgtctcaaaaaaaaaaaaaagaaaaatgtctgaagcagccatgcccccatggaacatgcctataatcccagttacttgggaggctgaggtgggaggatggcttgagcccaggagtttgaggctgcagtgagccatgatcgcaccactgcgctgcaccctggacaacaaaacaagacccaggctctgaaaaagaaaagtctgaactgtctttgctcattttgtcttagcaatatgagaagccgctgtctgagatggagccaaaggttctgagtgagaggaagctgaagacggtgttctaccgagtcaaagagatcctgcagtgccactcgctatttcagatcgcgctggccagccgcgtttccgagtgggactccgtggaaatgataggcgatgtcttcgtggcttcggtaattaagctgggacacctggatgtccatggggctctccatgcacctgtcctctcttcccttcttaggctgatgttttgcccctgatctcctgcaagctgacaagtgtgcagttctctctaaaggccaggctgaagttgcaatgccctggccaagcgtgtgcgctagggaaatgataaatggatctttaccagggaggccaaggcgttagaaaggcagacactggacagaagctgtatctgaggacatttaacaatatgcactttatcgagtcttggatgccccattagacgatttgctgaagctttttgttgttgaacaaggatgccgtgtgtttggcaatgttgtaaaattgccgtttttaagccctcacacaggttctcttcctgatctaggtgtcactttctgggtgcagaattatctgtgcctgggaaaaatagaaaacacgtgatgggaaaattcctagatgttttctcaaacttttgcccttggctgtagcttctgttgtgtagatacaggctttcggccctatgctgtgacacaggaatatgatgttgcaacagcttgcctgaacacttcctggcaggagaaagggttagctgcctggaaaccactggtggtttctgcactggcagtttcgagtcattttatcctcactccgtgtatgaatcatacttattgtatattggttggattctacctagatgtagaggattatgagtgaaacagattggtttctgtaattatttgagactatgatgctatcaaagggatataagcttgcaagttttgaaaaaagtgttcctcttcttaaatgaatgttataataataatacgtgaaatgttttcctatatagtttgtatatgtacttgatgaggtctataaatgctttgaataaatatggaaacaaaattctttcaaagatatttgcataataccgtttatggatccttaaaaaaagagaaatattggatatttattttgttattggattttttttctggctgttttatatattaggttcaaccttatcactgttctttaaatacctaccttcccaacatttttaaaaatgcaaacagattttttaaagaaatagaattttgatgaaaacattcctgctatcaatgccagtcacaccagagctctgccatccatcctaaaggacttacggtttcttagaataacatggagtgatttttctctctttgaatattgatagcaagggcaaatgtttctgcctcttaacagaaacctttgtgcttttaggaaaacgaacacgtgtagggcattgtatgttacgccagagaagcaggatcagcccccgcccccagcccccatttctagggtgtggttgaggcctgtttctcaggatattgggcccaccatggaatgagttgcatgactttcttgcctggaggttgaacccaccaagtgagacttggcaggaacttaaaatcaccatccttatttgtctgtagtcatgaacattcttaactgaaacccaaattaccatggttttgaacaaggatgtcagaaagtgctctggagtcaaaaaataaggtcaaaccagcaacttaactcctaacacgcttgcttaaagaaaaaaaatcacacagtcataataaagtttatcttatgaaaacatcacagtgaccgaaagagtattttgagggcgagtttcaaatcttctgttttatgttggaaaagggatatctggactctgtgatttctctctgaatttcctcctgtgtttcagttttctaagtccatggtgctggatgcatacagtgaatatgtgaacaatttcagcacagccgtggcagtcctcaagaaaacatgtgccacaaagcccgcttttcttgaatttttaaaggtaagcgcttttttttttcatttgggttttaacaccatctgataacaagttacatgtcaaagcttgactctgaatgcagttattcgttattaagatttcagtatcaatagtgccctagatattggattaatgctagaaatgaagatgaattttaggtcctaatgtagctttttgaaaacaattttatttgcaccttcttaaaagtgtatcagcagacagacagaaagaaagttaaaatcagatccccaaaaaagaagtcaagatcagatcccaaagttacctttccctcactgtccttcggtatggtattaggaatcaaataaactaaacatctcaattccaggcctctttgggatcggggagaggcaccggcctggagagtcagagcctggagcgggccctacccgagggggacgcaggctgtgttcctcccaatgctgaggacagcactgatggccttcctcaggggtctctgacctggcagtgatggggagcacgtcccctgatgggtgtgggttagcgttatttaatcagcaggcaggcagggcttccccagtcgtgggatgcgtgtccgaggctgtgttctgacagtttgctgcacaatgaaccaagctgaaacccccttcaaagacgtcggcggaactgagtctcctttgtggagcccctcatttgcatgataaaccccggggacaaagtgtgttcttgttacttggactgtttcttggaaactgctgctacctggagcgagtgaacacagggcaagtattctcgcccacagcaacgtgtcattgaagctggaattttttccctctgccttatccagcacggcggctcctgctcctcctggagcacagtctgtggcccatggaggtttgctaagggatcggatcgcagttcccactctggacagctgtgagctctgtcctaagggatcggatcgcagttccccctctggacagctgtgggctctgtcctaagggatcggatcgcagttcccactctcgacagttgtgggctctgtcctaagggatcggatcgcagttccccctctggacagctgtgggctctgtcctaaggcatcggatcgcagttccccctctggacagctgtgggctctgtcctaaggcatcggatcgcagttcccactctcgacagttgtgggctctgtcctaaggcatcggattgcagttcccactgtggacagttgtggcctctgtcctttggctagggaaccatctctttcttttggggaaagaaaacatggactcacttaagagctcactccctctggggattttgctgtactcccattaaggatgccagccgtggccgtgaccgcagtgcccactcctcagctcggtggctgccacgtggccttgggagatagactctctcatcccatttcattgctccaggacctgagccccaaagagtcgggtgccctgtgagctgagaggccgaggcacagccaggtctgtgctgtctgccctctccactgcacagccccctcagcagagggacctggagactccccccaggtcaacattgcccaacagccttggtagcaaatggccccactgcacatccctgatgtgctcagggagaggagccgtcagcctccaggacgtctttctgcccatggcaccggaagaggttgccagccttttctgggggcccactatggccagaacacagacacccaaggacagcccctggaatctgcccagtcccctggcccggggaattcacccctggagctgaggccaacgtgtgaggtcgggcccctgcagcaaagcggaagcccctagagcaggtgcagaaagtggctggaaggtatttggccaagtttcttcttgtagctgaagacaaggtgcaggcttttgactttcccgagtgttcagtgtggtggggaggaggcggccccaggggcagggagggcatggcagccctgcagggaggtgaccccggtgccttcccccacagcaggaacaggaggccagccccgatcgaaccacgctctacagcctgatgatgaagcccatccagaggttcccacagttcatcctcctgctccaggtaagtgcttcacggagacctcctcaagctagtcctctggctcgcccatgactcatttgaaaatggcgtctgttcctccactttggaatggctgcccctcgggcctcctcatctcctctctaggcagttacaggaggtggagggtagaggcaggtggagacctgcggagagtcaccctacgccgggggcagctgtagggcccagtgcctgcgaggccagccttgggggacagaggggatgggctgcggggaggggtgttgtgggccctggcctgcctcacgtgctctcacagggccccagcactggggggccgcggggcttggttatcagtggcccacaggtcacagctcccttctccagtgtgtctgtgtctggtctaggatcacatgaaaaatgattctcgcctctgtgcccagaggggatggacaagcttggaaagctaagaatagatttaaacaaaacatacccatcactgatttaacagcaaatcaccgaggacagggagatgctgcgatggtgaaaacactgtccactggaccctcatttctctaaactaaggattctcaattggatacctgtggctgtgaacagtaggcctgttctgagtgctgacgtgacgtctcacagcggacggcctctaggtcacgtctgatgcagtgtgtggttgcccgctcgttttccgaccttcccacataacctggagcccaggtgaccctgtaggctgcggggctcagcacccattttatttaaatgaatgccatgcctccagggaggatatttcaaaggagagtctatgctggtttctgcctgtgttgatttttcaatgattgctcagcttgctttttctaattaaatcagaggactttgcttggactgcctgcttattagagccgattaagatgaactggtggagtcatcgccagaaatgaactggcgcctgggaaatagtgtgaagtccccttccattgaggttatttttatttttgaccaaccaaatccatggcacattctttttaaataaatgtagtcatcaaagtatgaaaaaggatacatactaaaatatcgacatgggctctttccatggttaggttgatggctcatgttaattttatcctctggcttatatttttaacaatgtgcagtttgcctgtattacagcattaataacaaaagctgttttttcccaagatcaaaatattcaaagtgtgttttatttctttagctgacaaatatgtactgagttctaatacgtgcgagacgctgttggcttccggcaagcagccacagacgtgatgaatgagcttcctcgtgtgagggagtctggcgcttgggaggaagggggtcaggccgcctgttagacattagttattcagccacagctgggagagtgtcaccaggctgtgaaccatacgggcgggtgaaccagcccacatgccctgtgtttagcgatgcgccagtgagtccctgggtcgttcttggtcgccagggacgacagcaagtgctgactgtgttgtgaggtcacacacgttgttggctttctatgatttatcagaatactttctaaattttttaaatttattaaatttggatataattttcaaacaagcttgttaggttttggttaaatgtaagtaagtaactacaagtaagtaagtaagtaactatttttgcctaggttttttccgaaatacattcttttagacagaaggggtgggcgggctgctggaaacggaacaggacagagaaccgcagggaaaagcctctaccgggattttgaggagcccgagcagctcccacgtttccatccaccttcagccgtcctggggaggtcgttgtcccttttttatgcgctaggaaactgagttacgctctaggaaactgaggtttagggaagctgatgattctcccatggtgacacagcccgacagatgtgctgggattctaacacagttgtctagccacaaatctagtacactgtccacaccccaaaaggatgccagccaggactttgggaaaagcagcagatggaacactgcagacgtgcgctgtcggacgggcatggcctgcctgttacacactgcgccgtttacaaatctgttcttgtaagaattttgtacacttttcttttttgaaaacatacttctaaatatttaagttctctgaggaaggacattcttaaactcagaattccagttatgtaataaactcaagaacttgggtgtcaaaagacttgcacttagaaagattcagtgtgctcttccagatcgtcaccagcagagttacgtaggtcagtttgcacacagctctccccgtcctcctccctccttgcctcgagagaccctctttagaatttcccacacagggtctgttgcccctgaaggagaaaatggtctttgccttgatctgacaaaacaaactgcagatcctagatgtgccgagcagtttccctcagggacactttttgcccacatttgatgaaacgctggcgtatcctagagtgttctcggaggggagcagggtgggtccacgtactttggaagaggcagagttggaaacaaggtggtgtctgtgtctggagtcattgtgtggatgtgcctgaggggccctacctcaggtgtgggtactcagggcacccgggatggggcgaggagacaggctgcagagagtcagcaggtacaagcacataccctccctcctgccttctgccgtagtccgtgtgctgagtgtaggtggatggggagacagtgtggagaggcctggacaccctctgtccccttcctcccagtgactctcctggtctctgctctccggtcttgcctgcgttcttcctggttagtgctcccagaccttctttctaagacaggtgctgtgaagccacagctgtcccctggctcaggcagtgaaaccggctcaccctggctatgctggtactgtcagtttctcccatggatccagaaacatccattggccctgtgacatttgtctttatcccagctacctatttctctccgttgttgtgcaaagataagtaacaatttctgataataacagcagcgagaaacttcacttttctccttccctgagcctccttgggtggctgccagcccggcggatgcccccggctgtgctcagtggccccacggcatgtcggactccaccctgtgctggctgctgtctccatcgcacgcctagtccccggtgccaccaccagtgtgtgggtttggtgcagaactagtgttaagattgttcttttttgccttgatagaattcgttgtgactcataggaaaacaaatgtatagaatagtttatattcattacaaactggaaacatttaatcatttatgcaatgtcctttccagattttaaaaaaaggtttaaaaagataagcacgctgttgaattccatgactactaatattcctataaacatgtcaaagatggtaggcaagacgcagaaccacatttttttttctcactctaagttctgggatatgtgtgcagaatgtgcaggtttgttccataggtatacctgtgccatggtgggctgctgcacctagcaacccgtcatctaggttttaagccccgcgtgcattaggtatttgtcttaatgctctccctcccctcaccccccgccccgcaacaggccccggtgtgtgatgcgcccctccctgtgtccatgtgatctcattgcagaaccacatttaattctgagaaagagtgtttcaagttcacgtttgccccttcagcaaacgtcagcgtgtcgaatgtgaacgaaagctgggaaacaaaaggccctgcataaaaccaaggtgacagaaatgtccttttgttactgcctgttaacgtttatcctgtgattggcagcagtgcgtcattttttgctggctgttgttgttgatttgtgccacataccctccctttgacctcctcgtgcttgtctgaaaccttaactgggagaagaggtagctcaactccctttttttaaagactactttttaagagaaattttagggtcgcagcaaaattgagcggaaagtacagaggtttcccatctacccctcccctaacatgcatagccccctccccccacatctccaccagagtgcatttgtgacaaccaggagcctgcgtggccacgcagccactgcccagcggccacagtcgcaggagggcgtacccttgtgctgtgcattcggtgggttcggatgaacgtttagtgacatggacccaccacgatagtgtcatgcatctttgccgccctaaaatcaggttcctttgtcactgtgagagagactcgatcctgctgtgtgagttgacaccatgggtgcagtattcggcaccacagtactcctgcacattggaaactgggagactggtgttttgaagaaagtagctggacccatctgtgcatgggttcatctgtctgactcaacttgagaaggagaatctatcatcatcgtgagcatcgttccaagtgcacagtatttctgagattgtgatatgttcatatttagcgtgtcctttattgtacagtgctattttttcaattttgtttttgcaaaggaagctgttcagatgttcagccaagtcgtgactcactcagctcatcatcccttcccaagaactgactttatttttccccaggatggcagatgccactgcctcctttccattgtcagctggcgggtgacgcgactgttgttgcactgggagtgtccacgtggtaactgcccacctctcccctgttgcttgtaggacatgctgaagaacacctccaaaggccaccccgacaggctgcctcttcagatggccctgacagagctcgaaacactagcagagaagttaaatgaaagaaagagagatgctgatcaacgctgtgaagtgaagcaaatagccaaagccataaacgaaagatacctgaacaaggttgagagaggttttcttcaactctattccaaaattatttttgctttgtgctaataagctgtcgttgtccagcaatactaatcttttggatcgtttggagtaattcccttcgcccagagttcttaaccggggtggatggaggccttcgggagagtcacaccaatgtggaaattgtatgtaaaaccttaacagcctgtcttaacagcattttcttaggaaagagattcatacattcattagaccctcaaatggatccaggacctcccaaggggttaagagcaactcctttagcttacttttcctttcaaaataacggtatttaatttcagatagtaatagttaaagctgaaaatatttacaggctaggcacagtggctcacacctgtaagcccagcactttgggaggctgaggtgggaagatcgctggaacccaggagttcaagaccagcctgggcatgatagtgagaacccatatctaaaaaaagaaaaaaaaaatagctgggcacagtggcatgcacctatatagtctgagctacgtgggaggctgaggccagaggattgctcgagcctgggaggtccaggctgtggtgagctgttattgaggtgctgcactctagcctgggtgatggagcaaaaccctgtttcaaaaaaaaaaaaaattcacaaacattttttgtcttcacctatgcatgggctaagctgcattgagcgtgaaaagagatgcaggacccagaaggcggcagttcatttgccaggctacatttcagcttgatgcttacataactacttgtctgcagcagtactctgaatttatgtgggctttcccgtattcactgaaggccctggctcacagggagatggtaatttgtatgaactgtgttaagttattgcatctaatattcattattgctaaaaatcattattgctacaaatcattgttttgtcattaggagtagtttcttacgttacaatgacattcagtaatgtaactgtgcgaactttatggtaatacactttaagccacatattttccccatttctccaagtggtttatgtaggaacgtttataagcagcaaattgtattcagttatattcttgacatggttcatgttatttaaaatcatgctccctgtggcacttgaacctccgaatacacatggggcacggagcaagcccagaggcccaggaagaggggatgatgcttcgcactgaatgtcacccacatgcctcatcgttcccgtgcacttggcagggacattcagggaggcgggtgtctcgctggttgctcagagctgggcagcagcgtaggtttagaatcaaaagacagcacagaccaccggggctgaggactctgtttttcttgtgggctgagttgttataagtattggccgggtgcagtggctcacgcctgtaatcccagctctttgggaggccgaggtgggtggatcacgtgaggtcaggagttccggaccagcctaaccaacatgacaaaaccccgtctctactaaaaatacaaaaagaaacaaattagctgggtgtggtggtgcacacctgtggtcccagctactcgagaggctgaggcacgagaatcaattgaacccaggaggtggaggttgcagtgagttgagattgtgcggctgcactccagcctgggtaacagagcgaggcttggtctcagaacaaacaaacaaaaaaggtagtgtgacttctacatcgcataccattgtcttggttcatacaaagcgtctttctgaagaactgatggttttgctttggctcagtgaagtaaaatatggcctacctttaagaagttaagatagtcatttaactatgcttaattaggtttacttggggaaaagtaaaattacaaaacaattccttgcattcctcaccgttcctggttaatgtagtgtttaaatcgcgggagggccaactgcggtgaaagtctgtgaggaaggaggcggatgttcagcgcagtcacggggaacataggaacgatttccgtaaagcgctcagtttggaaaagtcaccctgagactccataccagacttctcctcatctttttcttttccgggtaaactgaactgtggtccctgggctgtgttttgaatgtccagcttctcagcagtggaagccgatacctcattcgatcagatgatatgatagaaacagtttacaacgacagaggagagattgttaaaaccaaagaacgccgagtcttcatgttaaatgatgtgttaatgtgtgccaccgtcagctcacggtaagtgcataaattctctatagtagtcctaccatcatcacatgttacctttgcctaagggcacatgcatgactttgttaattctgtcactcagactgaactggttttttgtgccaaagctctgtcctgtgactaagggaacccttataataagcaagcttatttttaaatagattcagtgtaagtcaccaagtcactgttagtagaagtacgtagaggtttatatactctttaaacagggctgatggcggaactagaaactcaattgaatttcttcataaccctcctaaatcaagagttctttttcttatggtttaaattctctctttacctgcttctctataaatatatttttgataaatgtttaaatataataaagttgggtatattcatatttattgtaaaccaagaaaatgagttattttcacttaaaatagttttacatcagaatcgttctccaatgcatggaatattgtagtgagatgaggatatgtgagaaactaaaaggtcttcaaatacaggtagatgataagggaactgatataaagttaactataacactcctggtgctgtagaaaataatgcaagcgaacgtggtgccaattcgtcatgtcttgcaagagtcaagtgttgaatcttccagagttttgagatccagttgctaaacatttggtagcttgaagtcatccacacgggaacatttacagcatggaatttgcccaacacgatgtgttaggagcctgtcctcccagtgagagccagctgttaaacgtttgccagcacaccactaaacatgccctatttttcatgcccgtcgcccccattttccagcggccagatatatctgcctgccctcctcaccttgccttagagacccaggcagcgagggtgtgcaggtcagcgctcaggagtcggactccttagtgtgaactgcacatccaccttctctgaactctgaaaattaccctctctgactttgcctcggactcctcatccgtgcaatagggttgatcataaaaataatgccagtggtacgctcttgcgggtctcttcagggatcaaggcgagaacgttcattaagctgctgcagggcacctggcacacggcactgcctgcgagggacaggttttcattgttgcttttcatcatcgtcagtgactttgtggcagctacaaaataagtccaaaaaatatgtgagtctttaatgacactccttcttgtaagagaaagaaccctgttcatttgactcataccccatggcttggccttcactgtggacgcctggcgacagccgcaggccacctgccttctgtgtgcagaagtgaagcccactgcaccctgcgttggagaggagctgacggagtgaggccgtgggaggtcgcagctggagaactccaggtgtgggctgctctagaggatgcttagaattgcgaggatgcagagtaaggtgtctccacccgtttccctggtgttatgaggtgcttcccatagtgtggagactaaaggtgtttatcacttaacagtatggcttccaagtttaactgtcccagaacccccctctccatgtaacacctggaaagttagttttcagtgaagtggccccactgtggctgaatccacccagctcctcacctgcaagttggcccacacgatgtgtcaagttggggacattaatgcttgttccacctgccctgggagacaagatcatagaagtgaaatgaccttgtaaacggcaaagtcctaagcaaatataatggtccttgttgagtcttttccgcattcatcactgatgtttgtctgacactgactgctgctccagaacccctcaggctgctgttggggagcgccaggacacacttgactcttgggcagttttaagtacgtttaaaattctcccgctgccagacgtggtgtactttaaagatgaattaaaatggatactttaaaagtaactcagctgtgcttactgctagaggattccttaaaataacgcccctgcctttcccacgatgccagggcttgaatttctttttttgcgaagtgcagtggtgagtcgcaattcctttcccatggacatgttgtcagtgtgagattttcagcgacagtgcccgaaggtgatgagatgagaatgcattttgtttcaaatagctcccaaggaccctttggtcggccctgtgaacattaagattctaaacctcctctgtagggatggagatttttacattcaaagaggaggaatcggaattttggtaagaactcatgggcatttctgtttttctaaattggaggcacagtctaattcacggaacacaacccatctttcctcttactgtgtctgaattgttcttcctcctttcccttcctgtatggactggatgtcctcatggagggcagagtgctctggtgtaagaaggaactggagagcttgggtgcagacgggctcccagccagtcaggtgctcagtccaatgcatagcacccggcattttggttatttctacccacactttgatttttttttttttttttttttgagaaagagtctcgctctgtcacccaggctggagtgctgtggctcgatctcagctcgctgcaagctctgcctcccgggttcacgccattctcctgcctcagcctccctagtagctgggactacaggcacccaccaccacacccagctaattttttaaatatttttagtagagatggggtgtcactgtgttagccaggatggtctcaatctcctgaccttgtgatctgcctgccttggcctcccaaagtgctgggattacaggcgtgagccaccgcgcccggcccacactttgatttttaacggcaatatcttgaagaaaagcaaaacgtgatgatcactaagtgagaataatggttgattctggagggtgggatttcctggggctgcggggatgctggcgatgtcacagccttggccttggagtccgctacacagatgttggcgcaggtcgtttccactagactgtacatatgtgttttgtgtttcttcacgtatatgttctatttatgataaaagaagaaaataatctgtataagtcatagggttttttttcggttcaatttccgtatacttgataaatattttagtcatggagtgtaatggtatgatttgattctattaaagtggttacagtgtagccataaaagaataaagcagcaatttgagagttaactcttatgaaaccgccagagaatatctctatccacataggagacttttcctggtaatcgagcacctttgctcagagtcatcagcaagcaccgagctgcttcctgttaagcctttatggaaaacctcggagcttccgggagatccgtcccctgtgcggctcttccctgcactctctctcatccagttcgaggcctctttatggcagcaagtggggactcagtaagaaagtcagaagcacaattactattgtgagaaagtctgaagagttacaattcagcagtgggaagtttctcacttgaacatctgagggatgaacattaccataacgtgttcatgtaattattcgtaaaacaaggatcttttggtcgtttcagcccctctcatgacagccgtgtgatgagcagccagaggtacttgctgaagtggagcgttccactgggacatgtggacgccatcgagtatggcagcagcgcaggcacgggcgagcacagcaggcaccttgccgttcacccgccggagagcctggccgtggttgctaacgcgaaaccaagtaagtgatgctttctctcacgttcgtgccgtggggccagggtaactctcacgttcatgctagctgtggggccagcgtaagctccaccatcagcaggttcagggtttaacatggcaagtctgcagaggtgatccagtctctagaatctgtatgctgtctgactaacatggccaagtcggctgctcatcactgacttgtcccacgtgcagctggggctccttcgggttcgggccgtgcacctggccagtcagaagtggattccgtcttcccggtccagtgagctcagttttgcgtttccagttaaccaaatcaggacttggcagtgctggtctcttgagtgtgtggagctggcgtgcaggaagtcatagagcttgaggcggtggtggttccagctcggctctttgctcacctgctcacactgctgggcagcgttgtgatgtctttactcagtttccccatggaggcagtgcttgtccatgaacttcccaaggtgaaaggagaggagtcagaatgctttggcaatgtcttagcattgcacatgatttatgattattattacctaacattgttcagactgcagattttaatcttagtgtaaaaatcattaccttctcttcattattaaaaaaaaaatccaaagaacgactggctaagttttattcactttttgggctctacccctgaattgtagaacaatttaaaaaacacgatgcatgggaactttcagttaacctttcataggttaaatatgcatgaatttttcagattattttgtttctgacatgttcagaagcaaggaaaccacgtgagaacgtttaaccttttctgattgaatttgcatattcacctggatttgcagaacatgatgtaaggagtattaggtctaattcgctttgggaccgcttttatttttctcattcccctgatgttaatagtcattctgtttggtaatctgcctagtaggctaattcgtcaagcatattattacaatttgtaatctcttaaatttctgactcttaaatcctcgtcctatttaaagtggtatgcgtctgtatcaaaccctctccacaaataactgaagtaccaaaacccagatttcccaaaagagctgttctggggggtggtatggagagcgagagggaggagccgagggagaggggacatggggacagagaaatcatttctgacatgattcattaacattttattcaagagcaaattggatgccttgttaaagatttttaaaaatccttttaaattatttggaaacattgattggcaatcaaatttatattgtggttttgtgaacaaaaacaccttcatgtattttataatgctagcaatcttagaatttattcataattaagatggccttattgtatttaaatagctaaaggtgactttgatccataaaatagtatgtattccatgcaatgttatattttcttattcatcttattatttatgatttatgctgagctaacttagattgattcagttagcaatgtgaaaaaagcataaagcagggtgattcaacccatttttaaaatactatgtggaggaaataacctggagtgagtttatcattgcatttgcaccctggatttaactatgagcttcctatcagccacagcaagaggagaaacactgagtatggacaagttctcattgtctattaaaaagaaatatgccacattggagagtaaatgtttttctttattctgaattcaaggaggtctttggtgttatatctccagttaaggggactttgaaacacacttgaaaacgtatatgattgtgttttgcatacctgcattgattttttttttatcacgtctctatggaaaagcacctagttaacctcagtgaaaccatttttccatgggacatctttttgcccaatgccttaaacagagagcttaaatgataaacttgttttgccatcaatagtgttttgttcctctagattaaaaaagaaacttttaaaacaaattatttaaaatgtgctaattctgtatgtgtctgaagatagaactcaagtcagaattctctggggcttttttccggcgtcaggtaagagcatggtgctgtcttgcatttacagagaaggtgaaagtgggcaccgtgcttggtgctgggactggcagggcttctatcccgacacgtctggattcatccagggtggaccgacagtctcttgttagcattgatcttgagtgggtctatgtggtatcacatccatcatgttgatcccatgagtgccacgctgcagccggtgaatgacgtcccttcactctgctcatctcagctcactccttaccgtttatgctgacaaaacccaggtacatccatgaaccacatctccatggggctgcctgtaatacctccctcagagttttcatcaaatggcttcaaattcactctcagtgtttgtttcttccggttctcttggtttgtcacttctaaattatatcgagaagctaagtcagaaattctcattctcagtcgatagtcataggacttctgctgcttgaatgactgttctaaaattcagtgttggaaatgttggtgtgttacttgatattgacagagtgtaggcagcactgcccagcaacctctgcttgcagagcgggcagcgtggtaaccacctgagaccagtgagcagctgcagcagggagctccctgtccctgcaaaagcgccgtgtcgattgtgtgtttgccgtgtggtgttagactcagcaggaagctcgctgtccccgcagaagcgccatgtggattgtgcgtttgccgtgcggtattagactcagcaggaagctcgccgtccctgcaaaggcgctgtgtggattgtgcatttgctgtgtggtgttagactcagtaggaagctcgccgtccctgcaaaagtgctgtgtggaatgtgcatttgctgtgtggtgttagactcagtagggagctcaccgtccctgcaaaagtgctgtgtggatcgtgtgggttgagtgtttgccgtgcagtgttagactcagtagggagctccccatccctgcaaaagcaccgtgtggattgtgggtttgctgtccgatgttagattcagcagggagctccctgtccctgcaaaagcgccatgtggatcgcgggtttgctctgtggtgttcgacatccggagttatgatgtggcactttcctctcttgcagaggctgcaggctggtgaccatgggtcccctggtccatggattggtttaagctcccaaactccctgatgctgttttgaaaaatgtcgtgtcccctatggatccatggattggtttaagctcccaaactccctgatgctattttgaaaaatgctgtgtagttttctggggtgattttaaaggttttgccagcctccccgattgggactggtggcggggaggaggaagatcgagcgtgagccgtcagttgctctggcctggtgcagcgtctttgttggtgcactccacccggccgctgttccttctcacgttgcgctccatcctgtctggcaggtggatttatgagaaagtaatgttcactgttgccattctgtgggggggtttcttcatgcaggatctttataacctcaattcattttcaacagatggactgtcaagcgctcctagttctcgaggtctggtactaagtaggagttgtgggggtgggtggggaggtggcgcatagccccacctttgggagcctttagaacgggaggagaggtgagatcagttgctctagccgggctctggccttcaagggtgtttcagaagaatggccactggagagctgttaccgcccatccttcccagggagaagttcttcgtgtgtgtgtgtgtgcacttttattcaactggtctcaagtcagtgtacaggtgaagttcttaaaatgtttagagaaatgtgagtacaacttgaatctacttgaaaggaaacactccttcagatgtgcaaatattcatcatttacttttgtaaaaatcagtcacattactttgtagttatttaatccttaaaaatgaatgaaggtaaaaagcatctgtgttcctcgctgtaaggtcaccttttaacggaacaggattggcctctgatgtttctggctttgcttgttattggaccagcatctacctggtccaataccagcgtcccgtccctgcactggcagcttgcctagaaggggccctgcagcttccagaaggccgctgcctccctgtgtgttctcagaactttgcagcaagaggggaagtccactcagaccgccctgctctggcccattccgctttctgtcccggaagcgtgtcctgagtgccaggagtgcttctgtacagttgagctggatatggcggttggtacaggaggatttgtaacaagacacagtcattatgaacaggtagctggaggagctgccagcaagcttgtaccgtgaggagggtgagagacagctcctgaaacctcagggtccctgctgagcatagagaggggaacttccaggcaaacgcggaaagggtcgtgggtgaggtcacagagttgagggagctcccagaaaacacagtacctcccccacaaaattcacacggttttaaaaaacaaagcaaaacactactagcaaagaaccagcaccaaggagggaggaaggcgggcgtgacttacagtctttaaatagaagtgagcccggccgaaggaagcttgaacagctgaatatacacctgactgatcctcctgaagtagaaggcagcaggagaagcggagctgtatttttaaaacgtgaaacggttcctcatgaggctcccctgagctgcatcctccagggatgtgtggccaagtggccgttctgtggaggcacggaggggtctgagcagcgcgtccagccacagccctgagggttctggacacagtgaccgatgtgggaccccaggagtgacgggttagccccgatttctctccctggcccctgcccgatgcactgcatggcctcgcctgtaggcagggacagtgcctggtctccaacgtgtcctctccagagtaaggtacttctgggcggcaagggtcactgttcttgctccttatgcctgtaagagtgaacttcgttttgaaggtgagaggacaggcacagcggaagcccaccatggcaaagctgtcgtgttttgaaatacacagcagtcgaaatgaaggaaacagaacaaaatgcctctgtgctccattgctgtgggaagggctgcttctgcgtcatctgaacgttgtactgtaaaacagcacgtgtgtgtgtgtgggagatgaggccaggactcggcgctggttttcctgtatggcgtgtggatttgcaggtccttcccacgactcaaaagtgtcattataacccttgaacgagtactgagagcaaacacaccacctggccaaaggtagcagggaggttggctttccacactgaataccgtggatagtccggaaacagtcttcagtagctttcctgcaatgcgacactgaggtcggcgtgcctgtggaatgtgacaccaacagatgagcccctcactgggggagcggatgcagctgctcattactgtgaagctgctgacctcctgccaccactctctgtgtcctgtgcccctgtgtgctcatgcggcgtgttcagtgcagatgaacggcctcccttcgtacagacaacatctgtatgctgagaaaggccttcaaacatacatagggagtaaaaccacaaagagctctcagagaggatgggcgctgactccggatggaaggcagagtgaaaacagggtaggcgtgccatggcttttcagggatttttgatgaaaatggcatctgaagtgaatggagcaaaacagtcacatcacagattctgggcagtgggtaaaaatgtgtccatgagttattctacttttctacatttaaagagtatttcatactttcacaaaatgagagcccattaaggaagcccagagccagcctgggacttgggtccctgttagaatggctgttccaagcccatccccaggcccagcctctgtctgggggaggaaacgggggcagcatggcagatggacggaaagtgggaaagggtcttccagcatcacacgtgctttcaggacagtcccacagtggtggcgatgccacatgcgtggctctgttctccatgcaggtggctgccgccttctccgtcactgtgtctgtttatatctcccgttacctcagggacaaacactggtgtgaattttctgggtattcagtaacacacccttcaaactctctgtctttaggagctcaacaggaggcagggagaagtggttccatgcaaagagggatacccatattttctaaatatgacatgcacactagtccacgtgatctgctgatgccaaaatactcattctcattcctaacggcctgtatagctgacctgtgaacttagacgccgatgcatccctggagctatgactgtcagtcaagttgacattccagaaaccttctattcagggtcacggccctgtccaggacctgacagccagcgtctcaggaaagctatcatagctcctcagccatggggatgggccagatgagtgccatgcctgtgtgtcacatgccagtcattcccataagtctcgtggagaagactccctcaggaaagtgcagctggcacatgtccctaagtgtggacggccagcccacggaaaggtgcacacgcaggacggcctgtggacagggtcctctctctgtgtcctaagtgcagacggccagccacggaaaggtgcgcatgcaggagggcctgtggacggggtcctatctctgtgggaatcacacacgtgtgtcctactacacatggacacatacaagttaggtgttgagcaaattaatattatgttctgggtttttgaaccccatgaagctatagggatggttttacttgattaaatatctggaatttgagacatgacatgtatcttcgtgacagtgtgatgttcacgttataaaatgcttgggttttgttaaaaaccaaactggattttagtcacgggggagaattcttattgttcttctctgttcagtgctgtggtttcagctttgcacctgggagtctcctaggccttgcgctgggaggagctgccgtaacgtgtccagaaccacataggatttattttgcctgaatatagctgggatcactactggttcataaccaagatttctctatactttccatgttagaaaactacttgcttatagagaaattcaatttgtgcctcttatcagactagggacttatatatgatgctgtttaaaaattaccctctttctcctgggaattaattcttgttctctgttgaaaacactaaaacgtttaaagacagtaagaatgacctgtaattcttgtatctggagactgtattaacacatgagtgatttctctccagccttttcctcacaccattgtccgtataccacagttctctatgtgatcctgtatagggaattttcatttaatattataggctgaccattttctcagtctttaaaaattctgaatcgaagtcatttaaactgactacaggacgttcctcatgattgaaactgagtttattgcatactgcaagcttcttcagttactagaccactacgaacagtgacgtggagacatccttacacattagtctgataatttccttagaagtggaattttcaggtcaaagagtagaacatttgtatcctcttttagactcctgatgcatgtttgcaagttgctttccaggaagttttccccagtttccatttctactggctatgtctgactttgatgacacaatgaaacttttatgatttgatttgtgaaaaacagttttgtacatttgccttaatttaagttaaaaatttttaacgccttctggctctgacgtctcggtctcacatcgtggaggagaggctttaagatgctgtgagggtgccccttgaacccaggcatggaggttctcagggaccgagcacacccccaggggcttttccagccgtccttgctattgatctggccacacaaacccttccttgtttgccgcacaaattctgtttcactgacagaccctgaattttcaaacagattgcagggatttccatggaaacaagagaagcgtccgtgagaaagactcgggaagtgcttttgcggaagtgcagcaattgtgtgtcactgcagcgacaaagaacttcgctcacagaactgaaaactctagaaactgtcagctagagggctggaagtcaactctaacaaaaattctgatttgcaggtgtttctttctttttcttttcttttcttttcttttttttgagatggagtctccctctgttgcccaggctggagtgcaatggcgtgatcttggctcactgcaacctccacctcctgggttcaggtgattctcctgcctcagcctctctgagtagctggaactactcagagtgtgtaccaccatgcctggctaattttttttttttttgtatttttagtagggatgaggtttcaccatgttggccaggctggtctcgaactcctgacctcaggtgatccacctaccttggcctcccaaagtgctgggattataggcgtgagccaccgcgcctgaactgcaggggtttctttaatcaattttggcctgaaaatcaacatgaaacagtttttctgaaactgagaatcacatttgaaaagcactggccgcactgtgtggtttcttgttattcttgggatgtgagtgcagacgctttctttggcagcgcacattgtccccattcatgaggaagcctcaggttgctctgtggtgtcatctgtgccctgaggtgccctattatgaactgtctgatgatccggcagacataaaacgtcagcacatttccatggtccgtaaggtcgaggaactcctcctcatctcagttcagaaggttctttaatacactagggaaagagtattctcccttcccatgataggttcacatttgatggctgtgtgtgtgtgtgtgtgtgtgtgtgtgtgtgtgtgtgtgtgtgttattttaaaaatgtttatgtttttagttgacaaataatcatatacatgtatggtttaaaacatgatgttttgaaatatgtatacattgtggaatggctaaatcaagctaagtagcttatgccttccttcacacacttaccatttgttcatggtgagaaccttaaagtctactcttagtgattttcaagtatacaataccttattaactacattagacgtcttgaacctattcctcccaatgaactgaaatctgtgcacctgtgaatccctgtgacctatcccacatgttctatgggtgatagagctgcctctgtgggtgatggagctgttctgtgggtgatagagctgttatgtggatgatggagctgctttgtgggtgatggagctattctgtaaagtgacggaggtgttctgtgagtgatggagttgttctgtcagtgatggagctgttctgtgggtgacggagctgttctgtgggtgatggagctgttctgtgggtgatggaggtgttctgtggatatggagctgttctgtgggtgatggagctgttctgtagagtgatagagctgttccaggggtgatggagctcttccgtgggtgatggagctgttctatgggtgatggagctgttccatgggtgatggagctgttccgtgggtgatggagctgttctctgggtgatggagctgttccgtgggtgatggagctgctccgtgggtgatggagctgttctgtcgagtgatggagctgttctgtgggtgatgagctgttctgtgggtgatgagttgttttatgggtaatggagctgttctgtcagtgatggagctgttctgtgggtaataaactgttctgtcaagtgatgaagctgttctctgggtgatggagctgttccatggatgatggagctgttccttgggtgatggagctgttccatgggtgatggagctgttccatgggtgatggagctgttctgtccagtgatggagctgttccgtgggtgatggagctattctgtgggtgataaactgttctgtcgagtgatggagctgttctatgggtgatgagctgttctgtggatgatggagctgttctgtgggtgataaactgttctgtcaagtgacagagctgttctgtgggtgatgagctgttctgtcagtgatggagctgttctatgggtgatgagctgttttgtgggtgatggagctgttctgtcagtgatggagctgttctgtgggtgataaactgttctgtcagtgatggagctgttctatgggtgatggagctgttctgtgggtgatggagctgttctgtgggtgatgagctgttctgtcagtgatggagctgtgctgtggatgatggagctgctctgtgggtgatgagctgttctgtcagtgatggagctgttctgtggatgatggagctgttctatgggtgatggagctgttctatgggtgatggagctgttctgtgggtgatgagctgttctgtcagtgatggagctgttctgtggatgatggagctgttctatgggtgatggagctgttccgtgggtgatggagctgttctgtgggtgatggagctgttctgtgggtgatggagctgttctgtgggtgatggagctgttctgtgtgccctggagttctccctcaggcttactgcggagatgttcacgtgcatttatacatgtgtgaaaatatatagagccgcacaccaaaaatagaagggtcaatttgattggatgataattgtgaagatcatattttaaaagaagtcaactaattaataaagttaacattgcacttataattttatttactcatttatttattaattttgatacaaggccttgtttggatgcccaggctggagtgcagtggcacaattatagctcactgcagccttgacttccttggctcgagcgatcttcctacttcagcctcccaagtatttgggactacaggcgcgcatcacaatgcctggctaattttttttttaaactctatgtttttggtttttaaaactatgttgcccaggctggtcttgaattcttggcctttagcagtcctctcaccttgtgctcccaaagtgctgacattataggcatcagttaccacaaccagcctatacttgtgttacaaggttgtgtttatagagtttatcatcaaagtttgcgaatgaaagcaaatatgtgtgttatgaaacattttaaattataagcattctgtaaggataaataaagttgcgatgtgtaactactggatcagtttgctctttcgtttttttttgtttgtttgttttgatggagtttagctcttgttgcccaggctggagtgcaatggcatgatcttggctcaccatgacctcctccgccttccagcttcaagcaattctcctgcctcagcctcccgagtaggtgggattacagcatgcaccatcatgcccagctaattttgtatttttagtagagacggggtttctccatgttgatcaggctggcctcgaactctcgacctcaggtgatcctcctgccttggtctcccaaagcactgggattacaggagtgagccactatgcctggccgctccctttgttacgaaacttcatgatacttcaaatgcagttagtaattgcatttgtctagatagttgatacaaatcaggcttaccatgttcataaataccatgtaatcatgtcttcaacataaagtgcctgcaaaattataaatggttatgctactcctcagttatatagtaaatatttttagatacctatatctgaaatctttttattggaaatatgtaggttctttcagttttgacatatatatgtattatatctgttatatacactaaaagaacaagctgcataatttgtgggacgtagcatagaaggaaaatgcagagtcctttcctcaaaattattaagaatttcaggatgtccaggccaggcacggtggctcacgcctctaatcccagcacttgggaggccgaggcgggtggatcacctgaggtcaggagttcgagaccagccttgccaacatggtgaaccctctactaaacctctactaaaaatacacaaattagctgggcatggtggcaggtgactgtagtcccagcttattcgggaggctgaggcaggagaatcgtttgaacccgggaggcagaggttgcagtgagctgagatcgtgccatcgcactgcagcctgggggacaagagcgacacttcgtctcaaaaaaaaagaaaaaagaaaaaacagaatttcaggaggtccacatccgagcctgagaccaagttctgggccctgtaagctcaggtctgtgcgattctacagacccatggccgggaagcctgtcctgctgaaacacaaggcactttactcaacttaaatgaatttcttctccttgggtttgaattttggctccttctcttactggttttttgaccttagacaatttatttctatgagaagtggaaaagaaggagcgtattactgcatattgcttaaagtacagacactcaggctaattctgagatcaaatccttctcatctgtcatcagtcagatggggagatgggggaatctgtcctctgagcctgtgggcccgtcgtgggatttagtgaggaagtatttgaacattacttcctgtagtacacaggaagccctctgtgaggggtagagcaattctcacttgggcaaatagaccccgggacacgcgtcgttcctctaacccaagtcatcgaagacaaaccatttctattcccttaaaaaaaaaaaaaaactttaggaaagatcattggggaactcattttcatggtagatgaccccagttattggaaatgtggttcagattaaatgtcatttctaagtgcctcttactaatagctgttatgtcaacggtgtctaaaaaatacaaaagggacaaaacatgaatcaaactcaaattgtgagacattctttaactcaccagcatcctccaaaaatgtcagggtcgcgaaagaggaagattgagaaactcccccagactggaggagatttcagggacgtgaccaccgaacgcagtgcgagtccctgggctgaatccgggactaggaaatgacattcatgtgaaagcggtgaggtttgaagacggtctgtaggtcagtcaggagtgccgtgtcattgtggtgtcccggatttgacggtcatgatacgcttgcgtcagatgttatcctctgaggaagccaggcctgggcattcaggaggcagctctttgcaacttttccatctaaaattatttccaaataagtgttagaaaaggaaaaaccactaaatgcttgaaaatgtccactttttaaaagttctagattcacccctcaacttaaaaattatttagtatttgagtcttttcttccctcaagtattggagtaaatatggctttacctttgtattctttttttttctttttgcttattttgtagacaaagtttacatggggccaggacaactgtatcaagatttacaaaacttgttgcatgacttaaatgtaattggccaaatcactcagctgataggaaaccttaaaggaaactatcaggtaacaattgaagcaattggatttaagattctgcctttacttataagtcattgtaagtatgtgattatatctccaagttctaccagaagtgagaattcattttgactttaaaaattaatctgaatgtacattttctcttacgttagataaggtgagactatttaatggtaacttttcttcattttgcaaatagggtttaatatcagttctatcttagaaatgtctcagccccccacagtgtgatctgactcccaaagctttctttttcataatctaatagtttcatttggtctgaatttctcatattaaaattgtgtctttttatcttccttgggatggccctagtttttaaacacttttgaaatgtgcgtatttatttcctttgtagaacttaaaccagtcagtagcccatgactggacatcaggtttacaaaggcttattttgaagaaagaagatgaaatcagagctgcggactgctgcagaattcagttacagcttcccgggaagcaggacaagttagtagtagctttaaaacgaaaccttcttggccaatgctggggagaaaatggttctttgtcatgacatgtatgttttttggtttgctgattctatcagacaggcaaaatgtgtaatttaacctcacaggatggagcacgttttataaaatgaatgcttgtctgttgtttctggcagatctgggcgaccgacgttctttacagctgtgttcaatacgttcacccctgccatcaaggagtcctgggtcaacagcttacagatggccaagctcgccctaggtaaggcctggctggctgaggctgaatgaggcatgcggcgtgatgatgaattcctgcccacgagggtgaggtcagggttgagaaggaaactcagcagtagatccatgcattgacctgaaagagtgtttctaaacaggaaaattcaccctggcaccggcgattttttagatgttcatattaaaatagagggatcgcatattaaaatggaggggttaaaacggatggtgtttctggtaccagaacatgaatatcagttgaggcagctgaacacagaggaagcccgtggagcctggccgtgagccaggtgctcaaggcgggcggcgggcggcggccttcaaatggcaggggggtcattgttcctcttggcccttctgctcacccctcactgagaagcaaaacacagggctgggctggggggttactaaagatcctcccagcaccaaagatcaaccctgtggttttactgtagatggatgtgactttatgatttccttgttcctatgtctcttcagccttgattattttttgctctgtgtgtgtgtgtaatgtacttatacacatgcttacagacctgttacccagaacacactgggatgtcatgtgtgtgtaaaattttccttctgctgtagataatctgaaatgttaacggagtataaaatacagaagagaaatgcagagcgtgggtaacgccattgccccggggagctctgattagtggaagggctttgtcccggacgggaaagccgtcctgactttgtgctcacttgatgaggaagcagaaacacagcccctctctctcttgctgaataatttggtcatttttcaggtcaggttcagagtgacttagcaaacaaggaagtggccactctctaaagagaatgagctgaacgtgcagataagccccctttcgtcttcagatcagctatatattctttaatgctcaggttgacagtttgctttgggagtaaaatatttctccattttgttgtacttttgtttatcccatagcattataccatgttttaaagtttctcagtacatctctggtatttgaatctaaacatttcttttgctttggaaaaactggagaaagataaagggaagtggacctatgtggtttatacagcgacgtttggcagcctttgggtccagcgtattcaggaggcgcaaacagggagaggtccctgccacttagatggggccaggctgccttctaaaataatgccacgaatatacagcctatgctgtaagaagagattgtactgctttccacaagtaaaacatggcgttgtctggccctgtacaaacagaatgccagaaacttcccctgctatgacctgtggagctgcaggtctttgcatgtgagttaactgcattcttgctcatttctctctgaatataattgcagaagaggagaaccacatgggctggttctgtgtggaagacgatgggaatcacattaaaaaggagaagcatcctctcctcgtcggacacatgcccgtgatggtggccaagcagcaggagttcaaggtgaagggaggcagggcccgcggcccggggtgggacgcacctcgcagctctgaatgggccacttgggagatgattcttaaggggcgtggtcagaacatggtcctcccaggttcaccacagtgaccgcttctctagaggtcatttatctggaaataagactgctgttgattgaaacctaaaaaaacgcccagccattgtctctgaagcccagtcctgggccaggaccctggggtattccagcagtgccacagcacctgaggccttgttagttaaagaggggacacgtgtttcacatttgtagctctgttttgcctttgcttggcaagcagtctgtttccacagtggatcgtaactccaggtctcctgtctgcttgaggtaccgtgcccgctctttgccttggcagactccatctccagggtggcgtcttattaatgttcccagtgttgctgactcaggcatcacaggccagggccttcagtgacactgacaatgtcttattctttaagaaataaagatgtttcttctcaccctggtctctggccagggtttcccagcagctcccctgacccctcctgttgagagttgcaggcggtgcacaggactcctctgggagaggctggggtgggacagggaaggggagaggcacaggccatcacaggctgtacttgatgcctgcagggccagccctcccatctgaagcgccctgagctgccggatttcagtgtgctgatgggatctaaagattaagataccaaaggttgaatctccttaggtgttcacttctaaaaagctaacttctgagagttgtacttttaaactttcatcctccctattttaatctttggtaggtaatgaacctgtaatttctgtgtttatacattggaagtaagtcatccatttaagacgttatgtagtctaggagcctcttagctctgttttatatgtgagcgtttgattttattccattttagattgaatgtgctgcttataaccctgaaccttacctaaataatgaaagccagccagattcattttccacggcacatggtttcctgtgggtaagatgtgtttatttggttttggtacaagttcacagagaatcaacgttcatggtcggtgtgatgagagactgagatgtgaattgctcagtagagagttggcggtggcgtatcccagagtgtacttagaaacatgaaaacttctttgaaagggagctgatcacttttggaaaagatttacagttcttaggaatgcaaatatttgtttcttttccttttcatctaaaacatttaccagataaagttgagtccagagacaactaactaataagagaataattttaatatgtttttccattttggtgtcaacattgcatggattttttttcttgttccaagactggctttttccagtggaaacttagcagttaaaattaatttgttccaaatgaaatattgcatctgaaattaggctggaattgcagtagacgttcctggttcttgcaaaccagaggacattcttgaagctgtgtggtcccaggctctcccctctctggtttcctgtgttccctccctgcagcctcagactcgccctccagggctccactgtgcttttccaaactctcatcctttcctcccaggcgtcctgtgcagcacgccactgcctctcacttctcacatccacagctcctgcttggtcagtgttcctagttgagtgtcagaaattgaacaacccaattagctggtatttcatttgtaccaacctatgaatggaggagtagccttaattcccttgggggcttccacttctaagagaactgttttccgtccaggtaggcagacctgtcatggctgaagcttcatcacctggcctggtcatagcccccaggccctgtaggcaggacaggggcttggcagattggcatccttcccacaaaagcatgaaagtaggatgtctgtatgtagcgacaacaaatacaagaataaggagagtttaacaacattctcaaagttggtggaaaagaaaaagaatcaatgaaaacatcaccctaaaccagctagtgctttctgtttacagggatcagaccccttcccacttaaaaaaaaaaagacaaataaatttaagtttaaattgggaaactaactgtgctatgtgttctcgttgtagagattcaaacacacaggaagttcatgtacactgttgcagcaatgctactttagaaattccacggcaggcgtggtggctcatgcctgtaatcccagcactttgggaggccgaggcgggtggatcacaaggtcaggagtttgagaccagcctggccaaacatagtgaaaccccgtctgtactttcacatagtgaaaccccatctctactaagaatgcaaaaattagccggatgtggtggcacgagcctatagtcccagtttctcaggaggctgaggtggcagaatcgcttgaacccaggaggcagaggttgcagtgagccaagatcatgccattgcactccagcctgggtgacagagtgagactgtctccaaaaaaaagaaaaaaaaagaaattccacagcataccacatgttgacttccaatgagctacttgggatgcattcttactgatgtttttcctatttgaaaggtttattttcttagcctaggtcattgaatattagtgttaagttattaaaattgataataatctgcttcttaggattttaaattgaggatagatgggcccttaccttcatattgtgatgagtacgtgatttttaaagtatagaaatgtgactttgtagaaatgaaagttacgcttttgctttaaaattttttgaaaactgaattaaatgtgttgaaaagaaaaaggggctctgtgagcaattgtttaagaatttttttttatttttttaagtgtgttgattctcacatgaaaatcgaagcttgtcgtggcctttaagggtcaggttccagcgtattatggaagccgccacatggtcgttttcttctttcctcctaattctctgattcagatcggaagttgcacccatcaaatgggtcagattgccatcgtctcgtttcaaaattccactcccaaagtcattgagtgcttcaacgtggaatctcgcatcctgtgcatgctgtacgttcccgtcgaggagaagcgcagagagcctggggcacccccggaccccgagaccccggccgtgagagcttctgatgtccccacgatctgtgtagggacggaggagggaaggtagggcatgctcactgcgttacagagaattagcaagctctgcccatggagggcgtggtggggagcctgtcctggaaagagtccttgactttgactcaggagtagcccgtgcaggaattaggggataccaggggaaatttttagggtcattgcactttgaaataactagtgaattgggcccatggaaattattctaggaaactcttaaagagaagtggtatttctttaaaggggacagtttggctgtttgccactgaaatgtctcatttatattaatggttttgaaaaggacattccccccttatattttggaataaaacagccatattctatgtcatgatcatactgaattgctgacaccatttaaaggagagttaaaatgattttcctgatgtgaagttccaagatacacagtaggaagaactaagttttttcatatatcccagaatttcccttttaaaaataaagaaatcaaggtggttgcaaattttttaaaagtactggcaagtgtccctaggaatggagaaggaagggcaagagggaagagttgaaatgtttgtgtttatgttaacaggcaccctcgttcttgttacaacgagcaaatatatttattagcttgtatttttctcttaaagcatttccatttataaaagcagtcaaggctccaagaaagtgagacttcagcactttttcactcctgagaagtccacagtcatgagcctggcttgcacgtctcagagcctgtacgctggcctggtcaacggggcagtcgccagctacgccagagccccaggtgaggcgggtctcacggcctcctggccggtccttggggttcactcaggggactgtgcatccggtttagcctccccacctccccaccggcctcctgcctcccgcccctgtgcctccgcccctgcgctcgtcacccttgcccaaggcccgggtgccttgcttcttccccaaaaggtgtttgttgaatatacagacatctttcagaagtcagtctgcccgtctcctcccaccctcccacttctctcggcctgcctgtttctccccctcggatgggggcaccgggccatgcagagcctccttcagcatgtcctgcgctgaccagctgagcagcctgcccgcccggcggggcctcctgtacctgggccagccctctttgccccggtgctgtgccctcggtcccgtgccctcggtccctgctgttctcttggccacagggctaaggactccattgtgttctgctgggtgccttagacgaggccctccctggcccatcccgcctggtccccgcagccgctgggggtgggcagctgctgtgtgtctgttctctctccagcccctgccgcgttggtggcagctgtgctttgcaggctcttcctgtggatctggccgccgctgcttgtgggagctctgggtacggggctttccttccagcttccttggtgctggctgaggctgctctcctggcccctcactcagctctgagcgcaggggtgccgagccccagctggatcccagccagtctcggtgctgccatcctggagtggaacacgcagggcttccctcaccgaaagttgccctgcaccaccctccccacggccgggagcgacgccttggcgggtcctgttatctttcccaggccatccaccacttgttcttgtaccccgagaccatgtcccagctcactcccccatcatcaccaccctggtccacaccgcccagctcccgcctggatggcagcgtagcctcgccttcattcttccgcttctactgattcattctccaaatatttgttattgagctttttaaactgtaaataaggtttttaccctccccgcccccccgctgaaaattgtgtggtgagtccccagtgtacttagaatagaattccagtcctccagtccttgttccttgctcacaaggcattctgccctccaaccacccccgttctctctgctctgagtgctgctattggagttcctccctccttagaaatctgcgccagcccctcccagagcctggggtgttatttgcccccggactttgacacctcctccttggggaggctctctcgacctgctccacggggacggcccctccttctcccgtgtggttccggcctggcctgtgcgcacctgcgccaagaaggcctggacttctttctcactccggtaggtggagtaagcacaggagccgctcctgtctcgtccctcagccatctggagtgtgaccctgctgatccctggccgatccctggctccttggcgggcctctggttgcctccctctcatccggtgggtgccccggcctggattccggtctgcaccccctcttcacttggcctcatgatttcagttctccatggacggttttgtgtcttcggggttgggctctcccattccagtcctgctttgtcattcacctgttgtcataacctctgccagcctccttggccggctttcccgtcctgtctctgctccacggtaggcggaggcccctccgcatgtgcgccgagagccgcctccctgctgcctgtgttcctaccactctgcactcaactctttcatgaagcttcgtggaggaatgtgtgttgataggactttttcatataatctggatttttttctgtttttctaatttctattaaatgcaatagaaataacatttctattacgtaaaatgtattttatgcttatgtcccccttttttcccctgggtttactagcgagcatctctccagcctcttacttggctgcattgctgtcctgtccactgtggagccccgtgcagggctgtgttttcgccttgtcagacgcgttgcatgatctgtaactgagatctgctgaacgtgtctcttcgcatctttctcaccaagagctgtccggcgtaccgtgtgggagcgtgcgaggcagcctgcgcagaagcgcatagcctgccacttcgttcttggtggtgagggacgtggctggctggaggcctcggcccgggcagagggagggggaggctgcttcctagcccctcactgttgccagagctctgagctttcaagggacttaaaaatgtgaaattctgtgggcaatttccagatttttaagtgttagttcaaaacgtcattagcgtgtgcctggttccggctgcgatttgggatcctgctgagggctctggcctgggacacatacacagggagaagtcatcccaagaaagacaagcccacactgcagaatgacccacccaggtgctcagagaacaaagttcagttgttggaagttaaaccttaaccgagggaaacgtctgaagtaggccatcgtgtcattgatctttgagttctcgtttcaaaggaatggtgctattggtaggacactgccaagccacacctgacagccaggatccaagcacagtgggcggtgcatagagagagctctgacctaggattcacaaccctgcgttcttgtgccactccatgcccttcagagtgtgtgaatgtcagagaaaattgtagctctgccctgagcccacatatttctggaggttgccgtgtgccgtgctttaaagggctatgagtaccagatgggaaggcccatgcacatgtgtgtatgcacaggagtgtgaggggtgtgcattgtgtgagcaggtgtgtatgcatgtatgcacatgtgtgtatgcacacgtgattgtgagggcgtatgtgtgtgcaggcgtgtgtgtgccttgagtgcacatgtgcagacgtgtgtgtccctgtgtgcatgtgacggcaggtgcacgtacttgtgggtgtgtgtgcacatgtgcatgcctgcatgtgtgtatgtgtgtgacatgtgcacgtgtgtgtgtgcatatggcatgtgcacgtgtgtgtgtgcgtgcatgtgtgttgtgcatgggtgcatgtgcatatttaatcacataatgatagactgggccctgtgcagatattacaaaggaaaagcaagcccatgttcactggggctaataattaccctacaacacttttagcctaattgcaacataaaagcatttccattaacgttgaattataactaaaagtatgccacagaagtcagagcttgcatagttgccttttagtgactgcacacctccacttcagacacttgttttgtattcaaaggttcagtgcttgaaatccagaacaaagagataagaactgaggccgtgttctcctgagtgaagtgtgtttatttgattaggaagtcgacggcattgatggattaataatttagttacacttttaaggtcgatgccttaattaatggttagactgagaattgaagaattcattttaattatttataggataattacattagtcactttagaagtttatggtaaatcttgcctcaaataatttttattggtattcaaggtagcaactcatacttgatataaagtgtgaaagaccttgtcagtagatctttggatatattttcaaaccagaatatttcacgactgtctaggcttcaagaaagggaacaaattcatcaaaagtaaggaattccttttacctcaattttgatttcttaaagtattctgtgaagatatggcctctcttcgtgatgcagtatagagcaaggcacatgttagaacggaagcagctaatggggaaatgtaacatctgcccagttattttggatgcagttccttttaatgatgactgaatcatcttctctgctattattgtaaatggtcgtattgactgaatacctgtgtgctgggtactgtgctgagctttgtacatgcattatttcatttttaacttttgatacaacctttgcggctagtggtaggatggtctcgatcttaccctgaaggaagctgagattcagggtgaatgagtggtttgtctgggacacacatggaggggataggcaggggggcgggtggggggtcttgagggctgcgtgtcccacagctgtctgtgcttcccgactgtgcaccatggcccaactggggtgggtgtcagcttgtcgatccccagacacagccaggatcaggcacaagcattaacattacaggtgatccttcgggtgtcagttacttaaaatgatgtatgaccccattttcccattcctgtgcacagaaaactgaacttgaatgaaatgaaatattttcttttaagatggatcctgggattcagaacctcaaaaagtgatcaagttaggcgtcctaccagttagaagtctactcatgatggaagacacgttgtgggcggcttccggaggtcaagtcttcatcatcagtgtggagactcatgctgtagaggtaagtcacttaggtggctacacggtgtggaaaaaatgcatttcagaaacagctcagctgacttctggtgccgaagtcaaggcttcttgcctgtggctaaatttccttctagccgggcacagtggctcatgcctgtaatgccaacactctgggaggccaaggttggaggactgtttgagctcaggagttccagatcagcctgggcaacaaagtgagatcctgtccctacaaaaaaattagctgggtagggcagtgcgcacctgtagtggatgtggtggttgcacaccggtagtcccaagtactcgggaggctgaggcaggagcatcacttgagcccaggaggtccaggcttcattgagccaagatctcgccactgcactccagcctgggtgacagaacaagaccctgtctccaaaaaaaaaaaaaaaaaaggaaagggaaagaaaattccttctagattttgcttagaaagacaagattagcaagaaaattcaactaaccattttttaaccatttacctgtgttcactggttatctgctaagtaaaagaaacattgctttaagaaatgtgttcagtatgaacctgtagagtcctccaggacttagggaaaatttgcatttgattgaggtgacatttcaattcagtgggctaaatggatcattcaccaaagaatcaggagacaagtgggcagccgtttggaaaacacggagctggctctcaaaccccagccctctcctcctctaaacactccagatggatgggactttcaccatgaagacgaaactataaacctctaagataaaaagcagtagaacagttttattactttgcaatggagaaagcctctccaagcatgccacaaacccagaagttaccataataaataaaatggtacaatttaataacttttttcacattgaaatatgtgtatcaaatatttatggaggaaaaattgggaaaaaaattcctgtatatatgactaagaattaatgttcttaaaatacaaagatttcttattaaactaagaaaaaggtaaccaacccaatagaagatgttcaaaggacatgaacaggcagctcacagaaaaagaaagaaataaacaataaactcatacacatataacttagcctccttagcaactaacattgcctattaaaacaaggtactgttttattaataaactttatttttagagcagttttaggttcactgcaaaattgaatgaaaagtgcggaattttccatgtacccctcctcccacacacgcacaccccccacaaccccccatcagccccgtcctggagtggtgcgtttgttacagtcagtgagcctgcatgggcctgtcatcattgcccagggtccacagtccctcatcactcagggtccactgggggcttactcttggtgccgtgcttctgtgggtttgggcaaatgtatctcagcattgtccaccactacagcatcgcgcagagtgggttcactgccctggaaatcctctgctctctgttcagccctccctcccccagtctcggcaaccactggtcttcagggtgccatttcttcagattgacagaaggtaaacactaagtacgacctggttggaacgtggggacacagggctctcaggaccgcggggtcttagggcagcccctccggagggcactcacctgttaccagttagcactggggctcataacgtcttcctggcaactccgcaccctagagaaatcctctctacagaggagcttgtgcacgcacatctaagggtatccattgcaaccttgttggtatcacaaacacttgggagtgtcctaaatgcatgtgcatgggaggagctggggaaatgagggcatctatgccccacagagcaggtgagctcaggcagcgggaggaggcccaaactctccttgtgggtgttcctaaatgcacgcccatgggggcacgtgcagggaagcaggctgcggaacactgtccgagctcactccgagggaggctgtggtgcctgatgagcccacccgtgtctgctgttagtggccgtgtgacgtgccagcgtgtgtgtgtgaagttggactgacattcctgaaatgatgaggaaaaggctacatacttcccctcacacctgcatttttcagccgtgtcatatgtggtgtttattatgaggttgcgctgtcttgttttttactgtctgttcttggccatctcttgaccccactgtccctaaacaaactgggataacacaggtgtgttttcacccaataaaatggaccaactcatcattaaaaattcctctgggccgggcacagcggctcacacctgtaattccagcacttttggagaccaagataggtggatcgcttgagctcaagagttcaagaccaggctgggcaacatggcaaaaccccatctctacaaaaaatatataagttagctgggcacggtagtgcatgcctgtaggatattcgggaggctgaagtgggaggatcacttgagcccacgaagctgaggctgcagtgagccaagatcgcactgctatactccagcctgggcaacagagtaagaccctgtctcaaaaaaaaaattcctttgaccctcacacaaaatgtcacaggaaagtgtcttcagttggggcaaggggtctaatttcatctctttgaagcctctgaagacgttctaatgactaaatctacacaaatccagaaagaaatgttatcattaagagcttctaaaaatacttctctagaccatcgttaggagggatgtatcagttccccaggttaggaactttaagacattttgctgacatttcatgaatcatatttgcacacactgacgagaccggtttcaggatgtgcctaggctgcatcctctgtcatctcagagggaaagtggctcctgagctgccacgtggacaccgctttggcttgcagcacagtgggatgcgggctaatgccgtcttcagccaggaaagggctctccggctggcccctggagacgtgggtttggttaggaatgcgaggtccacactggggcaaggtgcagatgggacctgggtcctgagcctcctggaggccgacgctctgccgtggatcatgaatagcattcccgcgtgagtctttttttgacacagcctccccgacgtccttcgagacctggtctgctagacaggaacagaaaatagctggacagggaggttggggtacatgttagatgatttttggcagtattgttcctgttacttttcatatccatctgacacttcttatttcacgtgccctgagaatgagaagccttcagtttcgtggggagccagggattagctagtgcggccatgcagggtagccccgtggatgcggtcacagcttcttgagtttttcacagcccttgtaccccatcagtacagccatcctagtaattgcgtatttacagagggagctcagccatatagtatacggtgatcttggatcagccgcctacctgggtctcaattgtctgagctgacagctgggggtaattcccctttctcaggctgcttgtaatttatatgctgtaaatctcgaagactcagagagaagcaatgtgtttggatccagatatagggctctttccttgcatttttagtaccaaaataactaaatacatttttagaaagaagcaaaaatctgctctctgaaaacatgatattcatcctgtcgttcccgttgtgcaggggaactgtggccaggggctggggcagcccacaggacctgagcccacaagattcgagccctgggtatgtgtccgccttgctgacagcgagggcagcagctgcggggggatccgtcccgaatggccatatgctgtcagaacagtgccggcctgggagctgcatgtgatctgggcttgggttgagcgggttgggagatgctagccatatttggaagaaaaaggcacctgaggctctgaggcttcggtgttcctggagtgactgtgccagtggaggagtcagcataccggtgggggtggctggccccgtcccagctctggcgccataacaaagcagcactgggcgaaccagtagagacgctgagccgggtgcttggtgcagcacccccaacgtggcagggggcacccacctgtctgtcagggccgtcaggagcagatgggaagacatgccatggacgctgagctgccgcacggtgccagtcacagtcacctggatgctttaggggaggggaagtatctctttttctccaactgcaaatggccctttaccctgggtttgtccaattgctgtttaaatctcatagtgttaggaacacgatgcagtgctaagggatctgacgtctgacgtttaggaaaagggtgaatcattctggatttctggggggcgttgcctggacaggtttcttgcttagagccttgagtcacagctagtttcagtggaatgactacagctgcttaaagtgcaaaccttttcttcctcactcttgattttctgcaatatgcagtgctcttgactgaagacagatggaaggaaggaaagagaggaaaaaggtttctggccctcatcctccactgaagggaaaaacaatgaaataataaaataggcgagatattaaagatgacctaaatagtgcaacatagtgatttgctgcagcaatgcgttttttttctcataggaagttaattcttgtcattgtgtagaaagaaacacagggcaacaaaacaggcctaagcgggcacggtggctcacacttgtaatcccagccacttgggaggctgaggcaggaggactgcttgaggctaggagttcaaggccagcctgggcagcatagcgagaccctatatctaaacacagaaaataaaacaacaggcccaggtcagcagaagaggccagagatccccgaacactgtggaatctcagtccccagaaaatctgaacactgtggaatctcagtccccagaaacccccaaacactgtggaatcccagtccccagaaaccctgaacactgtggaatcccagtccccagaaacccccgaacactggaatcccagcccccagagacccccgaacactgttgaataccagtccccagaaaccctgaacactctggaataccagtccccagaaaccctgaacactgtggaatctcagtccccagacacccctgaacactgtggaatcccagtccccggagactcctgaacactgtggaatccatagcctgctttctttcagacaccttcagaatcacacaatttcaaggcaaacggagacttagagatcctgtggcccagtgttcttattttcgagaaccaaggcttagagaaaggagaagccatgcccaacatcagtgctaaggtaatacccatataatctgtcctccagaagaaacatagcaaacatttaccaagtacctagcactgtgcaaaaacagagcaaccacagatggttaagacattgatgacacaggcccggctctcagtcccaggatggctgggctgccagcgtgagtgagggtgctgtgggagttttgggggcaacactccctccaggcctcaggctggcacagtgagccgaaatccaggggcattgcatcccacggttactacgagtttcacgacggcagcagcaaagcgtcaagccaagcatgcgtccctgcaggcacagggccctcggcagctgcctagggatggtgcccatgtggctagctggtcgagggtgaggagggattcactaggagaaaaaccgggatgccacctcagagagggagagatgcatcaggcttcgagactactggtccccaaggggctgctggaagcagagggtgggtctgcgagcacagtaggggacaaggagcttaggtcctgtcactggctcagctcccggggactggggggaagcatgggcagtgcaggcatccccatgccgctgaaggtagccagcagcctttgacttgacttcttggagcacagttctgtgtagttttcttttaaacagcacttttgcagcagacggtgctgagccattgaagggttttcagcgtggaacagatgtcaaaatttgttttcagaagagtattttgccagcaacgtaacggggtgcgagacgcttggatactagaacaaaggaggttgcgctgggttaaaaactccatgggtttggtttttttaaatcatctttccagaagtttggattgtgattgtgaaagagtcaaaagcccgaggaaagaaagaagctttgctcctctatagtcacaccagagttctgtcatacgccacggttgtttgttttgctttttaaaatcctctctatggaagtcgccttcctctgccccaaacagttttccagggagtaatttctgctttattctgaactagctaaagaaaccagctatgatggagacttgtgtgtgaaacaggcagcaggtggccaacaaattagataatctagaagagatggacagactctagagtggcacaaactaccaaaactgaatcatgaagaaatagaaatagaacatttgaatagacctaaaagtagtaaggaaattgaatcagtaatcacaaacttctgaacaacaacaaaaagcccaggaccagatggcttcattggtgaattctaaccaaacatctttaaaaagaattaacagtactctttcccaaactctccaaaaatattgatgaggacggaacaacacttcctactcattctgcagtcagcatgaccccgataccaaagacatgacaagaaaaccacagaccggtatccactgtgagcacggatgcaaaaatcctcaacggaagacttgcaaattgaaatcaacagcgtactgaaaggattgtgtaccctggaaaaatgagatggattcctgaaatgcaaagatggttcaggacgtgaaaatcaatcagtggaatgcatcacattaacagaataatggggaaaaaacccacatgatcatctcaattgatgcacaaaaagtacttgacatgatttatcacccttttatgataaaaacaatcaaactaagactagaaggtgatttttcctcaacctgccaaaggacatctataaaacactcacagctaacatcatactttatggttaaagaagaaaagttttcccctgaagatcaagaacaagacaaagatgccttctgccatttttattcacagtagtaccggaggatctgccagagcaattagacaagggaaaaagagtggaggactcagatgaaaggaagaagtaaagttgcatttgcatatgatatcctcttgtatgtagaatattctgaggaattcacagcaaaactactagactaataaacaggttgagcaaggttacagggcacaagatcggtatacaaaaatcaattaaatttctatacactagcagcaaacaacctgaaaatgagacaagaaaacaacttcatttataatgctgtcagaaagaaaaatacttggagaaatttttaatcaaaaagtgcaagatttatactctaaaaactacaagacatcattcagagaaattaaagaatacctaaataaatgggaaggcatcctatgttcatagattggaagatgtactattgttaagaagaaaacagtccccaattggatctgcagattcaacataatccctatctaaatttctgctgcctttttttttttaaacaaaacttgacaagcacatcctgagattcatctggaaatgcaggggatccagaatagccaaaacaatctagaaaaagaacaaaattggaggcccacacttcctaatttcagattttaccacatagccacagtaagcaagacagcatggtgctggcacgggacagacacatacatcagtgacatagaccggagaccacgtgtgtctatgttcacataattttcaacacggtgccaaaactattccatttgaatgttgaatggcctcttcaacaggtgctgctggcacaacaggtgctgctggcacaacttcattcttccatgtgcagaagaatgaagttggacccctgcctcacaccacatacaaaattatctcaaatgaattaaaacataaatgtaaaagctaaaactataaacaccttaaaagaaattataggggtaaatcctcatgattttggactagacagtggtttcttagatctgacacctcaagcacaagcaaccaatgtggaaaaataagatacactgggcttcattaaagttaaaacctttttgcttcaaaggacactatcagcagggtgaaaagacaacccacagagtgggagaaaatacgtacagctcatgtgagaaggatctagtatgcagagcatctaactcactcttagatcttaataaaaagaaaagtaacgctattaaaggcaagggaactgaatggatatttctccaaagaagatgtacagtcgacccataggcacacgagaagatggtcagcattgttgcttgttagggaatcatggagcgaaaccacagtgagacactgtgtcacacactaggatggcaggaataataatgttagtggagccagcacgcactgcagagtacgtgaggatgctgggagactcttgctggtgggaatgcagaatggtacaatttctgagaagacagtttgtgatttcttcagaaagtaactcgtggcatgaccaggtgacccagcatttccagtcgtaggtgtagattcagaagaacctgatactcatgcagacacgaattatcatagcagtgttatttatagtcaaaaagcggatgcagtccagacgcccaggaactggtgaatggacaaacagaatgtggttccttcatacatgaggattggtttcagccatagaaaggagtgaagccccaactcacgtcacgtggatgaacctggaaaatgccaaattcagtgaaagaagccagacacaaaaggccgaacattgtaggattttgtttatatgaaatgtcagaacaggcaaatccagagacagaacgtggatgggatgagtggttgtcaggggctggggaagggggcataagggtgataaaatgttctggaattcaagagtggttaaagttggcaacttcccgaatatactaaaaagcacagaattgcgccctatagaagggtgaacttcatgatatgtgaattatagctcagtgttttcaaaaggaggtggcagttttggaagtagctgagaagttagcagaagttagcctgaagcaatggctgcggggagcggcctgcctagcacaggcaggaggaggggaaccctacagcccagccggaaaggggcacaggcttttcttccttttctttttccctatttttctttttaatttgagtgagacttgtgcatgctttggggctcaatgacagaagccaggagagacagggccccattccaggaggagggcgaggagcaggggaggaaggagccagtgccgcgaggaggccagattcagggagctctgcaggttggaggtggagtgtcagggaagtgtgggcctgcacaccttctcctctgtgacgcaggaggccaagtcagagggaggagggatcaaaaacagacccacgctagaaccatctggaatccgaaccaagacttcccaactcccaggcagatgctctgtctcccacgccgcacagcccagatagtttagactgtgaagatcctgtgaagcttcagttcataaaaacacttgggatctttgtgtgtgagattcgtgttccgctggggagtaagagctggattatctgcctaggaaccaagtcacaagtcagtgatgcagactcctttgcaattgtgagcaccagttccttctcattgacaaatatttaaattcaacttgtgattattgaagaaattttctatgaggaaactacgggcatatggcgagaggtattacacggctgactctagaatgggcattttatgaggaaactacgggcatatggcgagaggtattacacggctgactctagaatgggcattttagaggtggggctctcacttcacatcaggggacctggggggttccagtttgctccaggggggtggacagtcagatgtggagcccgctcaagacccacagtgatgggacttggggccgtgtgggccagcctccctgactgtgtcacctccctggggaccccagcctcccgcaccgtgtcacctccctcgggaccccagcctcccgcactgtgtcgcctcccccaggatcccagcctcccgcatcgtgtcgcctccctcgggatcccagcttcccgcaccgtgctacctccctggggaccccagcctcctgcaccatgtcgcctccctgggggccccagcctcccgcaccgtgtcgcctccctcgggaccccagccctgcgtgcccagcctgaggacacagtcctctcctcagctctcaggccctgcagcgcccctgtgtaggctggagtcctctggcccctgtccctgatggaatctcaactgaaataagaggcgatgccatgggagaagggatctcccatccactgaagtcgcatccctgaattcctgcccgccgggttcactgggctctgggcgcggcgtagtgccgcaggatggggtttggtgccacggggcatgtgtgtggagtcagcagtctccaccatgggggctgtcgtcttttcccttattctcagattgtgggacaactcgtagggccaagatgtcagtctggttatttcctgtgggtttttatgagtttcatcactttactttagataactgtgcaggatcgtgagtttctttaatttcaagagctgtgaggctgctggttcctggggcacgcagtgtctctaagcttcatcccagccctcaccctctgtcaccccctccaatccctgatgggcaaggcgggggcagtcctcctgggactgatcccagagagcctgaactccaggcagcccctgaggccatgttggggggtcgctgtgttagcagctcctgctggctgtggggtgacgagggcccaggcccaggcacccgtgggacccctcagagcaggccgctgggatgcactttcggagctgcggggctgcagctgagcctggaagctccagaaggaccaagttgcttggagaagcagaaggtgcctttccaggacagcagagctaagaggaggcacagactcagaaccagggtcaggctgcaggcaggcagtggggccccatgccatagcttggagacatcgaggaaggttccagcaggttctgatgggcctggggggatggatcctgtgcctcccctcgccagcctgcccatgtctcctttaggacacaagctcagtggcccctcggcaggcgcaccatgcctgtgtctttggaatggccattttctgggctcacaaaggagccaggatgattggaaaatggcaggcagttgggttgctggtgtttggttgctggagacgcctgtgatttggagcaaagcctgctactgtgttgcagccactgaatggcgctccagctggacgccacgtggacccaacaggccccactcagactcactccacggggctagcagacttgacctctcgatttcacagggtcagctggaggcccaccaggaggaaggcatggtgatctcccacatggccgtgtccggcgtcgggatctggattgccttcacctcagggtccacgctccgcctttttcacacggaaactctcaagcacctgcaggacatcaacatcgccacccctgttcacaacatgctgccaggtaaggggacgggacggggcccagggatgggacagcaaccggggacggacgtggggggtgcggagcgctgtcagcccaccttagcgcttcccagtgcaggacactgttcacaacatgctgccaggtaatggggtgggacaaggcccagggacagacgtgggagtacggagcatggtcagcccactttagcgcttcccggtgcagggcacaggtcctgaaggagccgcgtgctgggaggagccgcgtgctgggaggagccgcgtggcagtgccatctctgtaggtcagagtgggtgggagacgatttctcatcatcggtgcaacaaggccctggggaagccaggacctgaggctgaagaacacagaacaggaggcctccctttggctgggagggctgttggggagaggccaacagaggcctatgtttgtgaatgccctgttgctggtgggtgtcactgaagtttctgggcaggggagaaggccattacacattgagttttgggaggatcatcctacaacaggatggaggaaagaaatgaggagggggcccaaccggcttctttcacgggtagccggaggccgctgtggggtccgtggaagggctgttttgcttctttgcctgctggtgggtattggaagacatttgcagttttaaggggaaggcatgaagtaagggctctgcctccgagcccttcggctgctgtgacacacgccacagacgggctggcttacaagccagagaggctgcccctccgcgttctggaggcagcatgccggggagcacggtgcctgcagggccggtttctgggaggatctgcttcctgctttgcagttggtgccttctggctggggcctcatgtggtgaagaaagagccctggggtctcctccgcttcctataagggtgctaatcccatcatggggaccctatcctcatgaactcatctaaccctaatcacgtccccaaagccccgcctcctcgcaccatcccactgcgggcagggcttcaacatcgaaatctggggagacacaaacattcagtccatgacgggccatttatgatacgttgaaaaaaaccacaatgattaggggtctggttctagaacgggtgtgaggccgtcctttgacaaggggaggatgaggaggccgaggaggtgttgaggatgttcctcggggcctccgtgtccccgccgcactcccactggagatgggagggtgaatatattcggtgcacggtgggtccatgatagccgttcttttctcaggggctaactgtacaagtcattgttaaaatactacaggagatttctcttagtgagaaaaggaggtttatgtaacatgcaagtttatatttagagaaccaaaatggttaagtccctgtggctcagaaagcagacgctctgctgtggaccttgtgttttctttggagcactcactgctagagcaaatgtttgctgcaggaataggctgtccttgttgggacaaaaccaagtcacatccgtaattgccaaagcacgctctcacgcggcagtgagtgtccatgtgttcaaagttctgtacacaaggggaggtgaggagggtgttatgagaaaaacctctccactcgacctcccgtgggctccagcacccgagcctccaaatcctgccccagctgccctgcagcgcagacctccctccggggcgaagcagcccacggttaccctggtttcagagttccgagagcagccacggaaatgcagcggccctgcaggatccttggtgtttatccctctccgggtgggatcagaaagaaactcctaatcaagggaaggctctggcaagtgtgagtggagtttgtattttgaatttgatttcttaataaaataacccttgcacacgatttaataaaacccaacagcactcacgcccaggctatgaaaagcaaagcaggataggaaagcctgcgctctggggactcacagccccgcccccatcccagcaccccacccactgtcagcacccaaccctgcccccatcctcacaccccaccccgcattcagcacccaccctctcatcccagcatcccacccactgtcagcacccgccccggccccccgcactgtccccataccccaccccgctgtcagctgcctctcccgcccgcctccctactgctgctgctcgaaagccactcctgtatggcaggttcttgatgctttgttttagatactgtctttgacctctcctgtagaagagaaagatggaattatcctgcttccctccaagcatagagcacccaacacagtcctgcacccacccagaaacagaatgcagaccccttgccggctgctcaggtcgcaggttctggctaaatcgcagctgcctgtgttgcgtgttttggatgatgaagttgtctgtggctgggcgctgagccttccttgggacttttcacccttcagctcatagtttccaggcggccgatgatggatccatcccaagcccaccacaagcctctcacttggcagcagatgcatggggctctgcagagccaccatcccctggcgcccactctcccgggcccctccaacatcctgggctggctctccatggccacagtgcgtgctctcagccccctgctccgggggcccctgaatcgtgggtctttacttattcctacacgacatagtcaggtctgcattttagacccgcatgaaagcaaacacatgagtctgtccagatggagtgccgtgcttctcgttggcaggtttctccggcatttcggtactaagttggaaatagctccagcttcactgatttctggggtacactgactgctttacccacattcagttctctgctcccaggctgtggtctgctgccaccgtggccttgtcagcaggagaaaggtacacgggttagaggcaacctcggtgacaccagaagttcagttttgtttgtgatgcttctgacagtgattctctgtaagatcctcagtgcggcatagactgaaatggttctgattttcattgcattttgtgactcagagggaatgagcaggccagagagtcctttcctccagagagtcctttcatctcatctcctctgtctagtcgtctttgcctttcagctaatatttcatatatttcatagaaataagcattattgcatttcatgctgtatttagacattccggtgggggcatgctcataccgtgctgaagtgcgcggatgctgaggtcgccgggccgtcactgctcctgggttcttctcctccttatcgtccaagatggttcctggaggcccacacatgtcctctgtgctctgttcgcacacacacaaaaccttcattctagagttgtattcatgacgatgctcaaatgggttttcatgtgtgtgtgtgtgtgtgtgtgtggcaacaagacataaaattatctttttgtgctattgctggaatataaaagtcaggtagcttctgcaaatgaagacttgccaagccgaaacaacaaaatttgaaaaaaacaaactgtattataactcatgccttttgtgtaagttcacacaacgtgatgaaacctccttccttcctcagggtctcagcacgctggcccctggggaatccgtgaatctgtagctaaggccctggcttttctccttctatttggaattcacttctgaaaaccatttagctcacgttctttcacataagctacatcagattcaacacagactaacagttgatgaaggtctgtgattaacatacacattcgttagagcggtcgttacctttctaagttataaaggagtagagtttacagcgagtgagttcacggcgcctcagcttttaggttgtgagcagttgcagtaggttacatcaccaggcagatgtttcctgctctgtcccgcatgttcaaaggaggatatttttgatgggaaagtgctgagacacatggtaaattgcgcctttctgagtctccaccgagcgaatacagagcctccaggaactatgtgaccaaataaaatggccaaaatttccattagaaaaaaaaagacaaaaaacgtgtaacttttctgaagaccatggactacaccgtaagggaattcagtaaatgaaaccggactcaagatggtgagttaacgaacgagactgaggacttgggagccacagcctttctcggtggccggtgtggccctggcctgtcctttgttttatgttccaggctgggaagagcagagggcgaatccccctggtagcattccctcccatacttgggggacgtattgcttcttctactcactgttctgtctctgaggttatttgaatgaacctggatggtgttgtttacacccccagcttctcccagcctccagggcgggagatgcgtctgcctctgtggctgcctgcagaaggccctggtgactccccacggagtcaccatccagcagccgctcaagtgcagtcagtcccacttcacacgtgtaacccatttaccaacctcactgtgcagctgcatcaccgttcaccacctcagctgcccctgcctcccacctcgccagcggacctcacgtgggctccaactcccgggacccagccccatctgggacacgccctgctgtcctgttctaggtcactgttggtgcttccggacgggcacgggacgcctggatagcggcactcaccgcagcctctggaatcggaaaatgaccgcatgacctcgtgactgtggccctcagctttcccatgtaaaattaaagatgttgattggcagactgcttggaaaatgcaatggaaaaccactctctggaacttaactcttttacgtcgttcctgggtactttgaaaccagttaaaaacattcatatcgggtttctacctgcttttaccctttttattatttatttatttatttatttatttatttgaaacggagtttcactccttttgcccaggctggagtgcagtggtgcgatcttggctcactgcaacctccgcctcccgggttcaagcaattctcctgcctcagctcctgagtagttgggataacaggtgcctaccaccacgcccagctagtttttttgtatttttttgttttgttttttaggtttttttttttttttttttttgtatttttagtagggatggggtttcactatgttggccaggctggtctggaactcctggcctcaggggatccacccacctcggcctcccaaagtgctgggattacaggcatgagccactgcgcccggcctaccctttttattaaatgcaagctttggccagcattacaggagcccttccagaagccgggccatcgtttcagtcacgcagccgcagccttgcccggcacgcaggtggggcttctccccttcccagtatctcacatccctgctcccacagcggggctgcttcccatcctagtgccacacggagggccggggaggccgggttcaggtttgatgctgaactcatatgcacaccggttttctctctcataagacaatcatgtttcatgcttaaaatacttactgttgagtcaaactgctgctctagaaagatcatccacactccctttgcggctgcgccccgggctgctccccgtgttgtagagcggtcagcacttcggagcagctgggaatcgcgtaccctgcgtatcagctttgaagctgctgccgtgtttctcattagctttagaaagtaacagcaccggcttacgtacaggacagcgctgtggattcactatcgccctgaccaagtcacgccgaccaggccaacattcagaattcctgggacatgcatattattgagcttttaaaaataatatgaatcggcgtttagaaatagaaccaaatgtctttctttttctgtagtgagggttttttgttttgggggaggctgtttgacctctgtcgatacggagtctttggctctggtgtgaggttgtttttcatgctctttatcagagatgaactttgggtcaaatgcagggatatttaaaatagcttttatatctacagaaaagaatcaaactgtttttaagtgttcaccgtcacttctcaggagcaagctaaatgggcctactgtgctcctcagctttggggctaaacagagaaacactggggattagcttttctgtgtgtgaaggccgcgatgctgacgattgtgtcagagttgtggtggaatgatgtgacagtccagacccaccctgaaaccacagtgaggcggggtctttggagcaggtgatgtggctcccaccctgtaactgcagtgaggtggggtcttccttgtagccaccgtgaggcggggtcttccctgtaaccgccgtgaggcggggtcttggaataggccatgcgtctcccacattgttttgcagccactttctagccttgtcactgccggagcaaattgtttagtttctctgggcttcagatccttggctgtaaagcaaatcaaaaccaaactaacaaagagcctcaaaggcccttctcaccccaccatccaccgtgatgtttccctgctgtgtccagcgctgaggctgtgtgacgatgttgttcttcacgcagagccctggagaggccgttcagttcccctctagggtccaactgcggctgagggccggttactcgagtccagccgcgcccattaagagacctctcctcacttgtaaaggggtctctctgctcccaaagaaccacaggccgctgtgtatgtcgggggctcacgagctcacgtgctacacggcccagaagcaaaaggtttagacagattcatccaggggcttgattcatggctgaagcggccaagcagagccatgcagacgacagcccaggagacccaaccagacatctggcctgttctgttcaggtgcaggtgcagggtatgccctcaagacccttgtcttgctcatgtggttgagggagcctggtgctcgggtttgggaactcctgtgccacatcctgcccctggcggatttggtggtggcacgacaggcctgtggggtttccagcaccccgtcaccgccccaccaactctgctacacaaaccagacccgaagccactcatgtctttccgcccagggcaccagcggctgtcggtgacgagcctgctcgtctgccacggattgctgatggtcggcaccagcctgggagtcctcgtggccctgccggtcccacgtctgcaagggattcccaaagtgaccggtgagtggcacctgcagtctgagtggctgcatcctgtcttgcaggctcgtggagcatagcagtgtgtagtgtgatttaacatcctaggattctttaaacaattcatattatctgtggtttttcagtgtattataatgacttaatagactgtttaattggaattatcaatttatatatttttccattttttaccttagtagtccaaggagaatcttatgtttttatattctgtttactgccagaattagtttccatcattcctttctgtgttttatattgtggagaaggaagccgggatctccgttgttcctttgtgtgttttatattgtgaagaaggaagccgggatctccgtcattcctttctgtattttatgttgtgaagaaggaagccgggatctccgtcgttcctttctgtattttatattgtgaagaaggaagccgggatctccgtcattcctttctgtattttatgttgtgaagaaggaagccgggatctccgtcgttcctttctgtattttatgttgtgaagaaggaagccgggatctccgtctttcctttctgtattttatattgtgaagaaggaagccggggatccgaaaaggctccattgtgctattgcaatgtcagtaagagctcaggctggaacacatggcctttctggacacagtcccgttagggattggaggccttaaaacatgcttgtgtgtctggaatcaggattcccaatccagggaattggcccaggaaacagcctaagctaggaacaaagtatgatgcaagaagacatttgccacagcatttaatttttaacagcacgaaacaggaggtgacccgcagttcgtaatgacggattgggccatttaataaaatggtggcattgccggtaatgggtagaacacagccagcagaagtggtgtgtgcagagcctgcagtgacgcggaaaactcctcgtcctgttaagttcagtaaaccacagccttagattctatgtgggttactatgtcagccagggggaaatactaacagagaaaacgctttgcaggaagcttgtagagcagaactgttcctacgggctccatttctgtgatttcctcccaggccgacctgacggtggcttccgtgcactcagattttggcaggtccacccacaaggattaaggaattctagttttgccattcatttcctaatttatgtttttattatgatatatgggattgtacatgttgaggaccccaaatccaaaaacaaaatgcgaaatgctccaattttttttttttctttttgagacgtagtctcactctggcacccaggacggagtccagtggcacagtctcggctcactgcaccctctgcctgccaggttcaagctattctcctgcctcagcctccctagtagctgggattacaggcaccagccaccatgcctggctaatttttgtatttttagtagaggtggggtttcatcatgttggccaggctggtctcgaactcctgaactcaagtgattcgcctgccttggcctcagatgctccaaattctgtgtcgacgtgatgctgaaaggcagtgctcattggaggaattcagattttggatttcagatttgggatgctcaaccggcaagtgcaatgcaaatattccaacattaaaaaaaaaaatccaaaacacttgtggtcccaagaatttcagataagtgacactcagcctgtaaatacatagaattgtgcataacgcacagtttcacagtttaaatggtaacgagaagaggccacctgcctgtgcccaggtcagaaggggctgtgactcacacactgagcctcagctgccccttctcagcctcagccctctctgctcacaaccctaggaaatgatgatgctgagttttacgtcaattattcctttggtcctcctctgtagttgtaccaatttgtatcttaaagggtacttttcacctttccggcttttgcattttcctagctgtcccatggtgcaagcagcctctgttgctttttctctcagccttgctggggtcagtccctgctggtgccacagctatagtgctttcctctccctgcctgcagcctgcctctgaaaggaggtgccctcattgcctctggatggatagccaggtgctccctgaaaggaggtgcactctcactgttcctctggaggatagccaggtgctccctgaaaggaggtgcactctcactgtttttctggatgggtagctaggtgctccctgaaaggaggtgcactctcactgttcctctggaggatagccaggtgctccctgaaaggaggtgcactctcactgttcctctggaggatagccaggtgctccctgaaaggaggtgcactctcactgtttctctggatgggtagccaggtgcttcctgaaaggaggtgcactctcactgttcctctggaggatagccaggtgcatcctggaaggaggcacactctcacagtttctctggatgggtagctaggtgctccctaaaaggaggtgcactcactgtgtttctctggatgggtagctaggtgctccctgaaaggaggtgtactctcactgtttctctggatgggtagctaggtgctccctgaaaggaggtgcactctcactgtttctctggatgggtagctaggagcatcctgaaaggaagtgcactctcactgtttctctggatgggtagctaggagcatcctgaaaggaggtgcactctcactgtttctctggatgggtagctaggtgcatcctgaaaggaggtgcactctcactgtttctctggatgggtagcgaggtgcttcctgaaaggaggtgcactctcactgtttctctggatgggtagctaggtgcttcctgaaaggacgtgcactcactgtgtttctttggatggtagctaggtgctacccatttgcattacacatcaagcctctgtatatttgtgtggctggctctgctgacatgggcagaagctccttctgggggcttgcccaggggcagcatcgctggtgtgcagggatcacaggtgtgtgcttcgccaggtgatgagcgggcctgtccctgcacagtccccccagctcctgctccctgcagacttcactttgccactctcctctttgggaaatggactctcaccacggtggaagattcagtgatgtcatttgccttggccagagtaggatgatggtgagggctggggcctgtttcatctgaaagcacttggggaaaggacacgtgcccctgtccatatgtcatgtcacccacaaagcatccagaagacacgccaggtccacgtgatgcttacagaatcagtgtgggggttgcggggctgtgtgtggctttaagaagacctgcaggtgtttctgatacgatcgtgactttaaaatttgaatcacatcacctgaaaactgaaagtcctaattttaatcaaattatagagttaaattgttctgaaccccagaacgtttttgtaatgaaaaatggcaggcagccggtagtttagtcatttctttcccaaaccaacacatttcaggcgttaatatttctaatcaagacttaggaaaatttgggatatttccatagggtaagtaagaaggtattttatgcagaatggaaaaatgactattttattactttgaaaagtacagtaggagtattagaactgaaatagtgctgaggaaaacacaactttctattttagaaaatcatttttaaagcctttttcacattaagtaaaaacccagaggaatataatccagatattttcatcgtagcttattattcatgtatgcaagttacttacaggctttgttatttgggcagggaggaatgcgttggggttaagccctgcactttttgcttccttgtctcaaattttgcctattttaaaagacagctgttgaactgtttcccttttcaggaagaggcatggtctcctaccatgcacacaacagtcctgtcaaattcatcgtcctggccacggctctgcacgagaaagacaaggacaaatccagggacagcctggctcctggccccgagcctcaggacgaagaccagaaggacgcacttccgagtggaggagctggttcatctctgagccagggtgaccctgacgcagccatctggttgggagattcgctgggatcgatgactcagaaaagcgacctgtcctcctcatctgggtccctgagcttgtctcacggctccagctctctagagcacagatcagaggacagcaccatctatgatctcctgaaggatcctgtctcgctgagaagcaaagcacgccgggccaagaaagccaaggccagctcggcgctggtggtctgtggagggcagggccaccgccgggtgcacaggaaggcccggcagccccaccaggaagagctggcgccgaccgtcatggtctggcagatccctctgctgaatatataagcaggacggccgccttctgctgtcagaatttgcaatcaagggtgacttctcagctaatcctacagcctgagtggttaagctgtgtctacactggttgggaataaattaaaaacagtatttgggggagaaacgtgcaatagcgtaatggtggtgtccctgccaattccttccttctcttctgtacagcagaagtaattacaagcacttctcacgaaggcagaagactgatgcaattttcgagtaattgagtgcagttctgggaaaataccacattctttttgactgctgtagtccatatgtgaatactaaatgttaaacttcatcagcgtcagacctattgtatcatattagagaatttgcagactaagaatttatgagaaaatatatgtattcagtagtgcaggcatttattaacaattcttaaaagttttacctgattcagattcacgacttttatttatattctatatttttgaatttcagagtaaaatttgttaacaattttaaaagccaggtaacacctaccagtccagttagcatgatttgctttcagaagtgagctgggttttccaaagtggtataatgtgtgtactgtatattttaacaaagtaatatttttgtattgcatttttctattaaaaaattaacagttaatgtttcagtcaatgtattatctgtagcatttcacaaataatgtttgctttgaaccaaaatgctcagtgcctatcaacatttggactcaagcatcaacaccaaattattcctcccttctcgtataaatagagtgactatccacaggagaaaagtgtgtgctttagtattagaggagataggcagagaagtcttgcttagttccttcgtgcagcttcttgcccctgttgacgtggaatgctgtgtctgctttagcacgcacgctccgaatgactcctggtgctaggccatgctggctgctgtcactgagcgggactcaggccaagaggcgtgacctcgggccagcctgtctgttgtgcagacgcctcctctgcagaacgcatcagtttctattctgcagttgcagagccagccccgcgtgagaacgtgcataatgagtgcacaccatcatgtcaaggtgcatacttagtgagcgccatcctgctgaacgtgtatttcagtgtttcacttactggacggataacaagaaaaaaatcctaacacaggcaggcaccagaaataaatgtctcagcactttacagatgactaaaaatgttaattttatgacttagccaaatatgttctaggttgcatatatcccccatgtgaaagtgatttcttcccaagcttctcaaactgttagctgctgtctgacttcatcaataaagtatttttattttaaaatgcagtaggatgagttgcctcttttctgtgtcaagtggaaagggacatcaacctcggggggctgggtggggggcttggcctgcccgttcctagctgcatcaccacttgctgctttggggagactccgtgtctgaatcccagcaacgcacccaactgcgtggagcaccgcgctctgaattggaagtaggcactgggaatctttcaagcaactcatgtacttgttctttatttgtttgaagagacaaagtctccctctgtcgcacaggttgcagtgcaggggcgtgatcatggctcaccataaccccctgggctcccacagtcactgcagtctcaacctcccaggttcaagcagttctcccacctcagtctcctgagtagctgggactacagatgcacacaaccacacctaactctttttttctttttaacattttgtagagatggggtctcgctatgttgtccaggctagtgtcaaactcctgacctcaagcagtcctcgtgtctgagcctcccaaagtgctaagtttcctagtgtgagccaggagttggttggcagaattttgccacccttcaagcctctgatggcggctctgatctctgcgattcttccaggaaggcaggatggatttactaatttggtagaaaaggggaggggggttcagaggcttccaattgatgttcctaattcagtggttctgacttcacagtcatgcccagcctacacttggccattccattttgagttatgagtagaatgagtttcctgtaaaatgttcctattgtgggtgttttaccagaccagggccaacaccttacatggagagatgaaatggatgtgtaaagttaacttgctgggacagaaatctttccacacgattgatggtgcgggacatggacagagtggggtctgtgtaactgactccttaactccctctgccctcctagagaagagagacttccagagatcctgagagaggcagacgcgggagggctttgagggaggaagaggttggagaacgtgggctacaaagaactcccgctatgccaggacgcgggttctgctttcacagtgaatgaggaaaacaagcatatcaccaacaaatgaagccgtgcagacaggcaagtgcgttctctaagcaacaagcttctactgagcacctgatgagtgtcagaggtgaggccaagctctgtcttaggccctgaggatgggacaagagagaaaaagcctccctttggggttgccactgctggtttattccccctctcctctgcagagccctgggctcttcctggacagggattaacccagtgacagcaggacacttgggagcccagggccaaatggctgcgtctcccccagcttccgggcccccatctgctgggtagaccctcggtaacttgatcaacaaggagcctggctggcatcacgatctcacctcctgatggggcccctgtcctctggggcgtggccaggcttggtgtttcatcacagcagcccgaacgg

SEQ ID NO: 41 - DNA, 193457 bp, Homo sapiens
  source 1..193457: mol_type = genomic DNA
agtatcaaaccgaatttagtaggattcgaaatggtaaggactgcattaaattatttctctaattcagcagtaaggaaagtgaacagaagtctcggtgtacaaccacgccccgggttgacatctttccttccacgaagacactgggtacaagccttgatgtagctgttaattgccctcctgtttcctagaaagcttatagggcagcagtaggaaacgggttaggtatgcctttcctggtaggagccgagctttgggtcttatctctgccacttgttcggcatctgatcagtaaaaggggaccatgatgggaggcgaggcagtagacagcactttgtgacggttcctaaccagtcgctgttatcactgagcacattgtcctcgtaatccagaattcatactgccatttgaatattttttgtatttgcaaagaaaattttaaccacttaactcaaggctagaaataaaagcaattagtgattgcaagagaaatccaccggcagaaggcagggggagacgacttaagcctctgattatttttggaagctttatatgctttctagcctttgtcattgaatggattaatgtatgtgcctggcatagactaagtgctttgcttgttaaactgcccgcgggtcatagcgagcaaactgggggagcgcccagggacagtggatggagtgagtggagactcgtgtccttttaagaagaggctccatttcttcctcgcatgtcaatgtgtgcgtgtcatcagttgttcgaggaagctcgcgcatgacgcgacacttgccgtctgggctctccaggttcggcctgctgctttcacagcccagatcttcggcgtccccgagacgcagccaggcgcccggcccggcccggcccggccctctgcacagccccacttcaggccacgccgtttccttgaccttcccccggcagggtctgaagcgtcaccgtccgtctagagcagagtcgcgcaggcccctgccctgccggtgaggtcggcgccgcgctccggagagtcggttcctcccgattcagacccatatggcttcagatggaaccatcatttctgttccgtcatgaccggcttgcaaggtagcaaagcgaaacaaacgtctcgttttcagcctgtccccgccaccttgaaataaaaccggcaaaaataaaaagagcattctgggaagtacttcatcatttcaacgctcacgaattcaaaacataaacaaaggcttccgagtgccccggccaggggcgcggggcgcacggcgggcccggggcaggtaagcgcaggtgcgcgcccgcccccacccccggctccctccccatccgctccccgctccccttcccctttcccttccccgcccgctcccagccgccgccgccgccccgcgcacggcctggagcggaggctgcgcagggcgcggggcggcgcgggccgggcgcgggccgggcggacggccgcgtctttcttctcctggcggtgatgtcattgggcgacggcggccgaggccggggggcggcggcgggcgcccgcaggttcccgagccgctcctgagaaggcgcctgacagcgggccggggcgcacggagaagcgggccgggccggacctgctgggccgcgccgagccaatcgccggcgccggccgctcgatgggcgaggcggcggcggcggcggcgggggccgcgggccgggccgccgctccgaggtgaaggcgcgcgcccctccccgcctgcctcccgggccgcagcgatgaattccgccgagcaaaccgttacgtggctcatcactctgggggtgctggagtcgcccaaaaaaaccatctcggacccggagggctttctgcaggcgtcgctgaaggatggggtggtcctctgcaggctgctggagcgcctgctccccgggaccatcgagaaagtaagtcccggcccgcgcccccgcccgcgccccccggtccggcccgctgcggcccgggatgcgcgcggagcacctgaggccggccgcgctcgggaaacccgtgcgccctcctttgtgcgcggagcggcggcgcggccggcgccaggaccgtggcgggagctcggggggcgccattgtgtgcggggcagggggagggggccggggagcggggtcggggggaggggcggcgcgggcggcgggggtccccgggaaggagagtgcaccgcagcgaggagacggggcttctgcgccgcccgaacgctaagttgcccctccgcgtggggggccggccccgctccctggcagcagccgcatcggaaaccgcgttccgacgcggtgcggctcactccgctggctttgtgtggacagttcttgccggtggcgttgcgtgagtttcgcctcccaggttaattgaccggttgctctgtatttttaaagaggcacgcatctgtagctgagggctgcgctgtgaaacgatctactactttcccctcgagaaaattccccacctatccgagccgagaggacggcagacacagggtctaagtcctggcactcttcaaggcttgttaaaattctagatttcgttctcaggtccctccctcgttctgaacagaacctttagtcctgcaggcactgcttctcccttccggctggtggttcccaggctggagcgtgtgaaccctgacccgaatctctggaagtgattaaagtttgttttcatcgcccacaagccggccagcagggccgaggaggcaggagagtttctaaaaacgatgtctccctgtagctcaaaatactaaaatcttattcccagggtgtttcttcggggggtggggtgggggtgggggtggccaatatatagcgttaagatcaacagttatttaaaaggtgttaaatatagaaattgaagtgtaccataattaggaagaaggatttcagtttttaagtggggtgtattggcccccatacaggatgacaacaacttgtaaataaaatgccacgtaagtgacttgaaaaagtaaaatgtttaatttttttcattcacatgtacatattctcttgctacattttaaatgaggtcagaaaacattttatttaatatgaatttggcttgcattccacttttagctatttttcttacttggaacatctttatgaaaacagaatctgcatattagagtgaatggctgcctgcctgtccatgaaataaaaatgttccttaaaaatgaacctgatgtcacagtgaaattatgatttaagacaggaggactgaggagcaggagctgactttcaaggcattcaaaatactttgctgtttggatactggtacctctggtaatgaaagacagatgttgaaaagtgttgaaatgcatgcaaagttcaccaaaataggcttaaataaaattctgttccatccctaagagcaaagctttaagaagtgtcatatgctgtattgataaaaacatgtcgccatcaaagaatatgttgtttggcatattaactgtattaatattgattggccgacttcaataatcattttcttttaaattatagaaagattttcctagaaaaccgtagcgttcatttcatctctaaaacaacaaagagaagaacgaataaaatgttgagcttgcagaagccaagttgaaacaactcaacatattctaaaactacagtcatctggaaatttcttaggtcagagctgtttttgattccccctgagctccagttggtttgtgttaaactgactctgtcacaatgaaagtttaatgtgaaggcagcgtattgtagacacagttactggttctctggagttcaaaggtaggtttttggagtaaaatattagccgttttctgcctctgagatccctgtgtttcagaagttttgtgagctttttccatttgctaggcagagttatctgggtttctttctttcttttctttttctctttctttctttctctctctctctctgtctctctctctctttctttctccttccttccttccttcgagatgggttcttgctatgttggccaggctggtcttgaactccgggcctcaagggattgtcccatctaggcctcccaaagtgctgggattacaggcgtgagccaccacgcccagccagttatctgggtttttggtgttttcatgcttaccagataatctatgccacaaagcacacatgctgaataacttttacttaaatgtgggaatgtgagtctgaggatgttttttccttaaaaagaagcatttggaaacttaactgaatgttcatgtggacatgacaggggcttcgcttgacctctgctgcaggagtgccctgacagccagtgagcggagggcaagtggcctgcagccttcgcctctgcaggctcacaacctggcatgggccatgaggctggggatgagggcagaactaaaacgtggctgggtgcctcgggcttcccatatgtcttttattaagaaaccatgccctaatgtgtttcttccattacgctcatttgttctgtttcagagttaggaagagggtggagggagcagagaggacgttcacggcgtgtcagattcttctgctcatttaaaggaaactttccacccaggttcccgctttgcttttaaggtggaaggttagacagtgagaagatggaattataaactttacatgaacagttcagaaaagagacacttttcattatactggacagatgttttctgctgtaggggagaggaaaatgggattaaaaagttttcgccttctctgtatctggagatcctgcactttggttttctccaggaggggtcaggatgtttggctgggctgcccatgtcttcggcttcccacactcctcccgtgagcagaggtcatgacgtctagggagccctggaagcccttttctcacaaattcactttaaacatccctagggtatttagtcaaaggaggtgaaatcaagatacatgaattgtagaggatggaaaatttctataagactaatacaacacattaaaatcatggaaatcatgaaatgctcttttaatttcacttgtgaatgcaacaaatgaagtctcttaactcactataaaaaactcaaggaacttggttctttctctgtgtgtcccaggagaacagaacacagagaaccttcctgtgtaatccatgtgatgtgctcccgagaaccctggctaggtgtttgtggaatgtaattgaaaatcagacgctgcctcgggtcttagtgctggatgtggaggcatttgtctctcagctctggaggcccaaagtctgggattaaggtacctgcagggcctcgtgccctcagaaggctccaaggaggggtctgtcccaggccactctcaggcttctggtagttcctggcttgtggcaacacaagtccaatcttcacatgatgtccgtgctgtggtttcttctctgtgtccaaattcctcctttttagcaggacatcagtggaattgcattaggggcaccctaccccagtatggcctcatcttaaccgattacatctgcattaacttcatttctgaataaggccccatcctgagatactgggggttaggacttcaaaatacgaatgctggaggagcacagttcagctcatgacaggttgtttctacatttgaaccagatcagtttattagctattgatctgattgcacaatgccaggtgctaggggagattgcaaaacctaaataatagagtcttgggggttccagtacagaaaatgtaactcgaaagacaagaacagcatgaggcagaaggaagtcaagagtcgtaatgtcagatatggatgagaaggagcaaaagaatcaaggagctaaaaagaccagcatttgagcaggtcagacccaagactttgctgacgtgtgggtaagaatatggtttgcatttcccaaactgtaacctggcagccctaggtgattttccacaggcttgcagaaaatcagcaaatctgatgttgcataggaaaaaaggaaatacttttttctaggtaaactggagactcactttctgctcagtgtcaggattctggggttggttaggggctggggtgaggagaagcagaagtgctcacctgctagaaatgtgccttttcttaggtcctttggccctaaaaagaacgtgatgagtgatcacatgtggtggtagggtaaggttctcactcaggcccgtgacctgtagccgtcataaagacttgttgattggctaagtcacttatagagaagttataatatggtatctccagactgtgtttttaaggagacttctttaaaccctgcaaactgaataactggttatatcaagttgcttctaactaaactaccctgaatatggttccagaatagtgaattttgcaataataaacatttccttttgaagcatgtgactttatagtcctgtctcaaccctgaaccagtgtgattcttgtttgggtttcaggcctagggaagaaggtagctggaactgcatttgctggctcactaaaaagaaagcaaacaaactgaaattcaatttaaatcaggagtgcctgaagagatttcctgagaaccagactagaaactagtgtttatgttggcatcacacagacacaggagagcacacacacaagcatacacacacgcatacatgcacacttgcacatgcatgtgcacacacgaacttatgcacacacgcatgcatgcctgcacaaacatgcacatacgtaaacacatgcatgtaaatacacacacacacagacacatgcgtgtacatagacacgcacacacgcacacacagacacgtctgacgggggttgagggagtgggggaaggagtgctggcacatgtggcattccattttctcaggggcagctgctctgtgaactctccaagcccagtccaaaggatgccatctcaggacccggccctcattctattaatagaagtcactccagaatctgcctgctcgcctcctttctttaggcactgcctgcctttctatacatcttaaaagagaataagatgtctgcccagcatggcaggcagcatgctcctctcgtttgcaggcgctgtccctcgcaatacccatactgcagatgaggaccctgaggtctggcagttagctttgccccaggtcatctggctgcactcggaggcggaagattccagctcaagactgtgagctttctcatggaaaacaagactgattctgccacctatactgaacttaggggaagattcgcaaccactgccttcagaaatttacaaaccagatcaggaaaggagacggaggcagcagtgtaactgagcacccaggggggacaaaagtgaggactggaggggctggctcaggtcaccggccacaggggcagagtgggagccctcaggagtgcctggagccactgcaggtgtctcacttctcgggacatctggaagcagctctgcccttcagtagacagaccccaaaggcacccagggtagggccccttgccctgggggaacctgcagaagctcctgcagaagtctgtgtctgggcctttctccccggccgcagaacgtgtgttccgtgttcctgtaccatccaataactcactgtagtttctgggcttccctactctgtagggcttaccagatttccacttagtccaagatttcaaactgtgtgcatctacaccacacacacttttaaaattcaagtactatgtacacacgaacatctctctccctttagaggccactgatcactctaaaatgtaaagagtggaggcgatgggggctgtgaggtgagtgggggcagagccgtttgttcttgtgtagggtggattttagccgtttggattggagtcttgtgtaggcttgacgcccacgcgtctctcactgcacgagggaggtggcagaggcacatcatccctttgggcacgcaactctaccacgtgcatcgctgggagatgggaggactggcatcccccgaacccacgggtccctgcctggagacactgggagacccggtcctctgcgtgcttcagagtcaggcacacctggctttgttcccgcagccatttgctctgtgacttccggcacctgtctaacctctcggagtcctagtttcttcctcctaaaaatgagatgaatgatatccactggtgggggcagtgaggtcattaccagggtaaatgagtagatgtgctgggcacaaagtcattcctcagtacgcagtagttactgttttgttgattgacactgaaaaccttccccatcgtgtccagaagactgtaagccaagatttgaacctcagagccatccaaatccaggaacacgggttaattctcacaacagggcagactcttgcaactttcgggggctggcagcctctgcatcccactctggacagaccaccattgtctgggttggtgggcctgctgaacgtggcttccagggccctctggtcagcgccagatctgggcgcagctgctgagtgcacacagctgctggttggggagcgggagggctgagcgggtggactcaggtttcgcttatataaagtttcatgcatcagcagggccgggagtcagagatgggaagtgagggccagcctgccccacctggtgtctgcagagagagggctttggggccgccccggtccgactgcttcccgggtacagcttctgacttctccctcctttatcagttctgtcaagttagggtaggagaattaatctcttgatgtttttatatttctaactttagctttgaatttttaaggtttgatgcaccaggctggcagttctcaactctgtttttgcaggatggtgtcatgtctgctggggtctcaaggcgaggcggtgaggggaactgaaatggaatgtgtgcacagtgtatttcaaacacatgtatgtgaattcatttaatcatcccttttaccaggttcctattgtgtgcgtgctagtgacccaatcacacgcatggaagcgcacgcatggatgccagccataccacctcttcaggcaggtcagaagagaaatgctaggatcttgggtataaagtatttgtgagttctcaggatgaaggaatgtagagtcatccagcccagacgcctccttttgcagatggcttcactgagggcacctgcatgtggttgtgtaagctgtgtactgcccggtcttgggagaaccgttcacactgtagtctaagcaaatggctccaaggcctgtgctgggaggcggccctgggatactgtgtatagaggtcagcctcccaggacacaaagcagagtggagaagggttggggtagacgatagaagtggccccaattctccaaccctcccatgcccctggcaaagtgaccttgtagcgcctccatcaagaggtaggagtctgcttcctcacttcttgaatctgagctgtgacttgttttggccaatggactgtggcagaagtggccagtgttagttcctagcccaggccttggaaaggcttgcacttttctgcactctctcaggccctgtgtctacctccgaggagaccccagggcttgggtgctggtggggtgtgatcacatggaggagaactcagttgtccctgctaggccatcctggacctatccacagccagccaacctcaaacattgaagagagcccagccagggtcagcaagctgcctgccctgcccagagcaggcacagctgcaccagcaggcccggaccaggctgactcaagccagccactgaggtttaccatggccatagataacaaatcacacacacacacatacatgcccgtgccattcttaactaggggacatgccgatatatgtaaatacagtccatcccaatcacaagagtgcttgtacctttgtttaaaataccctctatatcctttatttccttgataatttcctctctagtattttctctattctcattttttagaaatcttattaagactaatcagagataatatctattgagtgcatactgtatgccaggcactgttctaaggactttgcccataataatggatttaaccctcctcaccaccctataagggaggtggtgacaggatcgcccccattttcagattaggaaacggagctccagagcggctggtaactggccatcgttggctggtgggctgcgccccccccccccggccccgccccctgcccctgcggctgccaggcctgctgggttgagtctctcatttgctgacctttccacttgtatgtttcttctccttctgaaagacatttccttgactttatctcccaacttttctactaacattttttattttgacctactttggctattttttttttaatttctaaaagttcttttttctcgttatctggtttctctctgtttcttccctttcagtcagtcccttcctgtttctgggaagattcctctcttcctgtgaacattcattacagtttccttgaagggtgcttccttccctgcattcactgtctctgtttcctctgagtcctcttatgcaattctttttttccatgttggagatttactgaaacatcatgtgatctttcaagtgtgaggccctcaaaatgaccaggaagtcctgtgtgactgctggggcccagggacatgcaggtctcgccatggggcagcctggtgatgcccagaagtctgaacctgttggtctcttctccagcagccgtgagtctctccagagactcctccatctgctgcctatcagagcagtgtccatcctcaccttggctcctgtccatgctggccctctccatgttctggcctctttggttcacttttccccagagaataagcctcggacccctgcaaggatggcaagaggggtggccagctgtgatggggctggggcccctaggcctgcatctgactctcagacaggtggcttgtctaccacctgggagggtgcacttgccactggctactgggatgggaccttctagtctctgctgaagccccacccatcctccgtctgctccctgccttcataatggtggcctggggataggtgtcttctagttttttttgttttgttttgttttttagacagaatctcactctgtcacccaagctggagtccaatggcacgatctcggctcactccaacggccgcctcccgggttcaagtgattctcttgcccccgcctctcgagtagctgaggctacaggtgtgcgccaccatgcccggctaatttttgtatttttagtagagacagggtttcaccatgttggccaggctggtctcaaactcctaacctcacgtgatctgcctacctcggcctcccaaagtgctgggattacaggtgtgagccagtgcgcccaaccaggtgtcttctagttttattgaagatgatgcttgtgtttcttgttctcctggctgttttggagggattttttttcaagagaagtgaggctgaaataattttactgtactgctttggacctggaatctttccatgatgagaaaaagagagagagtgagaatatatgaatgaatatccatgtcctatgccctgggtttcatatctcttcttctgagtactttaaaattactagagaaaacaaaactggaagctggttatttgaaatgttcttttttttcttgttgcttggtattttgtgcataactttattattacacttggagcagctttttttttttttaggggctggtgatcatcctatcttttctctatagaagctatatataattcagaatcccaaaaagtgtatataaaagaaacgtaagcctcgtccagtttatattaaattgcctttgtctaaaatgggcatccacagctccaagtgtgtttggatttgcgtgttctctcgccatgaagccttgttctgacagtgtgatctattagcaacgcctttaaagtggcctggttttgattatttgtaaatattatggccagtgatggcttttctccctcaattctgagtgtctcactactaatttcctgtgccagaatactttttcaccaatgtcctgtccttaaagtagcttaagttcataagggacttttaagtacccatttgtagttagcagatttttcagatgtcttttgttaggaatacagattttctgaaaaagccttttgctttctgaacacatgccaaaagattgtggctttgtcattcactttaaggaagaatgctacagtgattttgataggaaattgggagattcagaggatattcctggttctgattgtgtctgtttggctcctcaggaagagggagagcctcacctgcccatgtggaatcagtccaggcctctgtttaccttgagcaatgtcattggggcttcctctgtggtgcttaggaaagtgccttaagacctgggtttgtctcactgatctcataaagcactggtgctggtgacagatgtcttctggtggaaacacattttctggttataatcatccctatttgttaaggatttttgtttcttttgaaaataggctttaaggctgggcgcggtggctcacgcctataatcctagcactttgggaggccgaggtaggcggatcacctgaggtcaggagctcaagaccagcctggccaacatggtaaaaccctgtctcttctaaaatacaaaaattagctgggcatgatggcgggtgcctgtaatcccagctacttgggaggctgagacgggagaatcacctgaatccgagagacagtggttgcagtgagccgagatcgtgccactgcactccagcctgggcagctgagcgagactccatctcaaaaaaaaaaaaaaagcctttaacaaaatagaatatggccaaattcttgtgacttgtgacaaaggttaaacttccagaaagtgccctagaagccataattttccatgataagagactagaatggaatgtctttcagactttatcaattgatgacaaatggagaaaaataaaagttcatttatggcacttctgaccaagctcatttccctagattgaatctgagtaattgcaatgtcagctatctagggttggctcttcaaacaaataacctggagtcataagcacactgtttatgaattcctcaaatgaaattctgggagtgagacaccactcaccctgcacatagtcaaatcttttgttgcctgtaatggagcttccaccttaagaaactagaaaaataagggcaaattaaactcaaattaagtagtaggagaaagagaataataaagaacagaatggagattagaaaattactagcgagaacaaacaaaactgaaaggtggttatttgagaagaatcaataacattgataaacctgtttgtggactgattaggaaaaacggggaaaagacagaaattaccaacgtaaggaatcaccacagatcttacagatatcgaaagataataagtggatatgaaaacattgttatgccaacaatttctacaacttagatgaaatggataactttcttggaagacacgaagctcactaaagaagaaattgataactttaataaccctacatctattacagaaataaatttgtagataaaattcttctcataaagaaaattccaggccagatagtttcactggtaaattctaccaagcttttaagaaaaaaataactgtaattttacacaagctcttctaggaaataaaaattgggccaggtgcagtggctcacatctgtaatcccagcattttaggagggaggattgcttgaggccaggagtttgagaccagcctgagcaacatagtgagaccctccccccatcactacaaaaaattttaaaaattagctggatgtgcctctggtcccagctacttaggaggctgaggtgggaggatcacctgagcctgggaggttgaggctgcagcgagccgtgatcacaccactgcacttcagcctgggtgccagagtgagactctgtttcagaaaaaaaaaaaaaaaaaaaaaaaaagaaggaaggaaggaagaaagattaatagtgaggttgtacttcccaaaccattctaagtggtaagcattatcctggtaacaaaacctgacaaaaatattataagaaaagactataggccaataacccctatgaacatagatgtaaaccttcaaaaaatttagcaaatcaatttcagcattacatgtaaaagataagatatcataaccaagaagcatttatctcaggaaataaaaatcaatcaatacaattcatgatattaacaaactaaaagagaaaaatccagaggattatctcaatggatggcagaaaaagcattcaatgcaatccaatccaacgtaaactcttggtaaacactcccagtgatctaggaatagaaggaaacttcctcaacatgctaaggggcatccatgaaaacctacagcctatgtgagactcaatggtgaaagactaaaagctttccccctaagatcaggaacaagacaggggtgttcactcttaccacttctgttcaaccttacactggaggtctcacccagtacaatcaagcaagaaaaagaaaccaaagccatctagattgaaaaggaagaagtaaagctgtctttatgtgtagactatatgattgtgtaggaaattgtataggatctacaaaatagctactagaactagtaagtcagctggatgtggtggctcacacctgtaatcccagctactcaggaggctgaggcaggagaatcgcctgaacctgggagttggaggttgcagtgagccaagattgtgccactgcactccagcctgggtgacagagcgagaccctgtctcaaacaagcaaacaaacaaacaaacaaacaaacaaaaaaccagtaagtcagtttagcaaggttgaagggttaatatacaaaatcagttgtatttctatatattagcaacaaatgatcagaaattgaaacttaaaataccatttacaatagcaaagaaatgaaagaaaagacaaatgcttaggaataaatctgacaaaagataagaaaaacatgtacactctcagcaacatatattgctgagtgaaatgaaagatctaagtaaatggggctatacataacattctgggtcagaagtcttgcttttaagctgttctattcatattgatctatagattcaacagagtcacaaccaaaatcccagaattttttcagtagaaattgataaatgattctaaagtgtctatggaaaggcaaagggcctagaaacaactttgaaatggaagaagagagttggaggacttggtttccagggttttcataaaacaacagtaatggagtcagcacaacgttgcaataaagatagagaaatagatcaacagaacagaatagaggtagaattagatccttaaagacatagacaactgattttcaacaaaggtgccaagacacttggctgtccaaaggacactcttttcagtaaatgatactggaacaagtagatacccatatttttaaagatgaactttgatctatacctcttagtatacaaaaattaactaaaaatgaatcatagatctaaatgtaaagcctaaaactaaaaaactcctagaagaaaatataagagaaaacatttgtgactttggactaggcaaatattttttatatatgacaccaaaaacatgatccatagaagaaagaattccataaaagaaagagtggacaaattggacttaatcaaaacaaaaagaacttctattatttaaaagacgctgttaagagaatgaaaagacagtctatatattggaagaaaatatttgcaaatcacatgtctgtttaaggatttgtggctagaatatgtaaagaactctcaaaacttaataaagagcctaattttaaaaatgggcaaatggtttgaatagacatttcaccacaaaatatgtacagatggcaaataagcactcaaaaagaagctcaacattatcagtcattagggaagtggaaatgaaacctgcaaggagatagataccactacacacgtatcatcacggctgaaatctaacagagtgatcctcccaagtgttagcgtgtatgtgagggaaccagcactctcatgcactgacagtgggaaggtaaaattgtacaactgcttcggaaaacagttgatccgtttcttaaaggagtaaacatacatctaccaaatgtttcagctattctactttgagatgtctgcccaagaaaatggaaacgatacggccataccacgccttgcacacaagtgttcataacagctgtatttttaatagccacaaactggaaataatgcagatgttttacagttggtgaatagataaacagattgtggtatattcctgtaatggaacacggctcagcaataagaaggaatattccatgacatggatgattctcaaaattatgctgaataaaagaagccagacaagaaagtacttaatgtatgattccatttatagaagatttctagtgacagaaagtaaatcagtgctcgcttggggacaatagctggggtaggagaaagtgattgtggagtagctcaaggagacctctgcgtgaggggcagagtcattaccttgcctcttgtgacagttccatcaggttgcactatgtcaaaacttatcaaagtgcacagtttacatatgagcagtttattgcatgtcagtgatacctcaatacggcatatgacagtctttaccctgagcataattacgtttttgttgagtgtaatggagctttaactcatgttatttgctgtcccctacttttgaacctaatcgtgaatttagaaaatgtatagaattttaatgtgcaatggtaaattgtgtacttatgttttattaggggaagtgatttattgacagttcatttattgatttatttgtttattttctcatcaaatctttactatgttccaaggatagtgctaggaactggagatttcgcagaaatagactcgcatactatttagtgggggagaataacgtgaaaagaattacacgaactgattgtatcacacatgagctatgtgcgctgaaggcaagagacagatttccaaacacgcagcagaagaaactatgccccttggcagatggggccccagtggcggtttggggaaggctgtcctcaagaagtggcatttgagttgccctctgactgatgcatagctgtcgtaagaggaggggcatgcacccctacacagaggggcccttcaaggcctggggcaagaggaggcctgctttgctgggagtggcgaggaaaggcctggatgggtagtgctggaaccgaggggacgcggagagacaggcagagccaggcagcacagggctggtgggcccttagtttgcaaaggttttgatacttttcaaatttttaagggaagaatgatatgatcagttctgtgctttgaaaacaatactctagccatagcgtggagaacagatgaaatgagcccaggatggaggatgtgaagatggttatgaaactcccacggttgcccatggagagctgtgggagcctgggctggagtggaggcagtgctgacaaggagatggggatggcaccaagggagcccaggagggtgcggcggcgggcagacagggggacagtgatttgggtgactcctgggtttctggttgcacaacaggatagatggggcggtcgcctgtgctggagccctgggcgaggcttacctaggtttggggcaaggagatcaggaatggattcagggttgggtgtgtcgttggaggcatccgcatagagctgttggagcttagaggccccctggactgaagcatacacgtgggactcgtagtacagagatatgtactgaagctgaaggacttgtgaggtttcttacagggcagttaaagtgcgaacgtgagaaggccaagggccagccttgggaagggtggagatgaataaccaggtggtgctgatgagcctgaagagagaaactaaggcagggtggtcagaggccattaggagacgggcagtgacctgaggtcaggggacgagagtgctggtgtgtttctgagaggtcaggtgagtgcaattcagaagattgtctgctggcttgggcctgtgctgggtgggaaggagggtgctattcctagctgttctaggacaactggccagcacacacccagagcccacatactggagcaatgcaggcatgcccaggactgaagagggggctgggagggagcctggcagtcgcagaggggagtggaaatgttggaatagagttgtggagtatgagagaggggtggactcagtgagggggtggaccgtgagccctgtggaaacccacccatggaggggtgcatgcacctgtagcaattggcagggaactgagcgggagattagggcactcattaactgtcttgaatgtttggttaagaggaagtgatcttcagtgagggtcagcgtgtttttcttgataaaggaggctctagcaaactgtatccctttcaaccgctttaggggagaatgtctgatattttttctttcctttcccacattttaaagtgtgttcttttccttcctgatggatgcatctggtggtttaaggccaataagtgttgcgttgagcctgaacagttgtttgttactctcaaaatgtctaagactttcatctccagcttatacatgtattgatgtcaggtgtttaatatttcccctttgattcatttgatagtgaatggcttctgaggtcaggatggggacactgccaaaactagctgctctctgctgagtctctgttttgcaggtgacatttgatagtctagatttgatatcattaaggtattttagggaagtcaatgtataagttttagaaagttcaggtgcatgttgaggactattgttgtgagaatgttatgaatacacttgtgtctctcctgggattgactttttctttccctttagaaaacgctcacagtgtattacatatcatgctaaatggatggagatgaagcaaatccaggggtgctcattgggaatatagttcctaaataactgcagtaaatgtaagtcatgtcctggggaattatttttctaactcaaagcatgaaaacatgaacaattcagttctgtctccatgtgtgggagaagtaaactcaccacttacttttttctttttaatccttttttttttagaggaaggtgggtagagagtgttattgggagtaggggtagggatattgagggaagggagaatgatatacacacacacatacatgtacacacataagtacacacacatctatgcatatacacacatgcatctgtacacacatgtatatatacacgtatatgcatacatatttatatatacacatgcacagatatacacatgcatatacacatatgtatgcacacatatacacatgtatatacacatgcatatatacacatatacatacatgctatctacacatttatacacgtgcatatgtacacatgtgcacgtgtatatatgtgtatatatgtgcacgtgtatgtatgtgtatatatgcgtgtatatgtgtatatatgtgtgcattatataatgcacacatatgcgcatatatacatacagtatatacacacctctatatgcacgtatctataaacacatatgcctatacacatggatatgcacatatgcagacatacacatgcacacacataaacatacttgaacacgtgcatatctatacacatgttgatacacgcatgtatatgtatgcacatatatacatacgtttcagcttatgggcggaaaatatctgggttggtttggttttcctccttttatagtcagaaatggcagagctgctcaacacgaacttttgtccatcacatacagaaatgtcagtgatgtcactgacatcagaattggcagtacatgtttttccaagttgtcttcaagtaagatggttcttccatcttttttttcttttgtctaggtggttatatggtttgtaaatttgggtgtatgtgagactgcccaaggacctgtggaaattgagtgctggacaccacccccagagttcctgatttcgtaggactgggatggggcagagaatctgcttttctttatatatatatatatatatatatatatatatatatatatatatatatatatttattatactttaagttctaggtacatgtgcacagtgtgcaggtttgttacatatgtatacatgtgccatgttggtgtgctgcacccattaactcctcatttacattaggtatatctcctaatgctatccctccctcctccccccaccccacaacaggccccggtgtgtgatattacccttcctgtgtccaagtgttctcattgttcagtgagtgagaacatgcggtgtttggttttttgtccttgcgatagtttgctgagaatgatggtttccagcttcatccatgtccctacaaaggacatgaactcatccttttttatggctgcatagtattccatggtgtatatgtgccacattttcttaatccagtctatcattgttggatatttgggttggttccaagtctttgctattgtgagtagtgccgcagtaaacatacgtgtgcatgtgtctttatagcagcatgatttatattcctttgggtatatacccagtaatgggatggctgggtcaaatagtatttctagttctagatccctgaggaattgccacactgtcttccacactggttgaactggtttacagtcccaccaacagtgtaaaagtgttcctatttctccacatcctctccagcacctgttgtttcctgactttttaatgattgccattctaattagtgtgagatagtatctcattgtggttttgatttgcatttctctgatggccagtgatgatgagcattttttcatgtgtctgttggctgcataaatgtcttcttttgagaagtgtctgttcatatccttcacccactttttgatggggttgtttgtttttttcttgtaaatttgtttgagttctttgtagattctggatattagccctttgtcagatgagtagattgcaaaaattttcttccattctgtaggttgcctgttcactctgatggtagtttcttttgctgtgcagaagctctttagtttaattagatcccatttgtcaattttggcttttgttgccattgcttttggtgttttagtcatgaagtccttgcccatgcctatgtcctgaatggtattgcctaggttttcttctagggtttttatggttttaggtctaacatttaagcctttaatccatcttgaattaatttttgtgtaaggtgtaaattttgtataaggatccagtttcagctttccacatatggctagccagttttcccagcaccatttgttaaatagggaatcctttccccatttcttgtttttgtcaggtttgtcaaagatcagatagttgtagatgtgtggtattatttctgagggctctgttctgttccattggtctgaatctctgttttggtaccagtaccatgctgttttggttactgtagccttgtagtatagtttgaagtcaggtagcgtgatgcctccagctttgttcttttggcttaggattgacttggcaatgcgggctcttttttggttccatatgaactttaaagtagttttttccaattctgtgaagaaagtcattggtagcttgatggggatggcattgaatctataaattaccttgggcagtatggccattttcacaatattgattcttcctacccatgagcatggaatgttcctccatttgtttgtgtcctcttttatttcgttgagcagtggtttgtagttctccttgaagaggtccttcacatcccttgtaagttggaaggtattttgttctctttgaagcaattgtgaatgggagttcactcattatttggctctctgtttgtctgttattggtgaataagaatgcttgtgatttttgcacatcgattttgtatcctgagactttgctgaagttgcttatcagcttaaggagattttgggctgagacaatggggttttctaaatatacaatcatgtcatctgcaaacagggacaatttgacttcctcttttcctaattgaataccctttatttctttctccttcctgattgccctggctagaacttccaacactgtgttgaataggagtggtgagagagggcatccctgtcttgtgccagttttccaagggaatgcttccagtttttgcccattcagtatgatattggctgtgggtttgtcataaatagctcttattattttgagatacgtcccatcaatacctaatttattgagagtttttagcatgaagggctgttgaattttgttgaaggccttttctgcatctattgaaataatcatgtggtttttgtctttggttctgtttatatgctggattacgtttattgattttcgtatgttgaaccagccttgcatcccagggatgaagcccacttgatcatggtggataagctttttgatgtgctcctggattcggtttgccagtattttattgaggatttttgcatcaatgttcatcagggatattggtctaaaattctacagaactctccaccccaaatcaacagaatatacattcttctcagcaccacatcacacctattccaaaattgaccacatagttggaagtaaagcactcttcagcaaatgtaaaagaacagaaattataacaaactgtctctcagaccacagtgcaatcaaattagaactcaggattaagaaactcactcaaaactgctcaactacatggaaactgaacaacctgctcctgaatgactactgggtacataacaaaatgaaggcagaaataaagatgttctttgaaaccaatgagaacaaagacacaacataccagaatctctgggacacatttaaaggagtgtgtagagggaaatttatagcactaaatgcccacaagagaaagcaggaaagatctaaaactgacaccctaacatcacaattaaaaggactagagaagcaagagcaaacacattcaaaagctagcagaaggcaagaaataactaagatcagagcagagctgaaggagatagagacacaaaaaacccttcaaaaaatcaatgaatccaggagctggttttttgaaaagatcaacaaaattgatggaccgctagcaagactaataaagaagaaaagagagaagaatcaagtggacgcaataaaaaatgataaaggggatatcatcaccgatcccacagaaatgcaaactaccatcagagaatactataaatacctctacgcaaataaactagaaaatctagaagaaatggataaattcctcaacacatacaccctccaaagactaaaccaggaaggaattgaatctcttaatagaccaataacaggctctgaaattgaggcaataattaatagcttaccaaccaaaaaaagtccaggaccagacggattcacagccaaattctaccagaggtacaaggaggagctggtaccattccttctgaaactattccaatcaatggaaaagagagaatcctccctaactcattgtatgaggagaatctgcttttctaacaagttctcaggcagtgctggtgctgctggtcctggggccatgattgagaatcactgacctagcccactgagctcattagcccagcagcaccatgacctggaccagccagatggtgtgcatgacccttgaagcagacaggaggccacggtgtcctcacctgggcgtcttttccgtgcgtggcacaggctgctcactcaccttggtgtgccctccccatcctcatgcttaacaagtttcctaactagtaccttcttagttcaagacagagcagaccccgagtgctgcttcctcatgggcttttggagtatttaagcatggaggcagagagacagaaaggacatcctgcttgggttggaaggggactcggaaatttatctgaaaaattggaatcccatttgtttctgtgcataattttttaaaataaaaaagaatatgtttttttttcatacaacagaagagaaacaatctccattaagaggccaagctcaggaggtttgtacaagatttgatgaaatatgttacttaaattgaggcatgtatggagacatcagtgaaatattcaaattagggttgggaagaactatagctaaataagatattgagtcacaaaaaatgaacagaagatgaagtcacactgttttaggtaaagatgctttttaatgctgaggcttttaaagaagagtaaatcaaccatgttgcctggttgtgggaactaagggcagcctcagggaagagtctgggttgccagttcaaaaacacagctggggccaggcacggtggctcacgcctgtaatcccagcactttgagaggctgaggcaggaagatcacttgaggtcaggagttcgagaccagcctgaccaacatggagaaaccccatctctactaaaaatacaaaattagcctggtgtggtagcacatgcctgtaatcccagctactcggggggctaaggctggagaatcgcttgaactcgggaggcagaggttgcagtaagccaagatctcactatagcactccagccttggcaacaagagcgaaactctgtctcaaaaaaaacaaaaaaaaattagccgggtgtggtggctcatgcctgtaatcccagctacttgggaggctgaggtgggaggatcacttgaacccaggaggtggaggttgcagtgagccgagatcacaccactgccctccagcctggatgacagagcgagattgcatctcaaaaacaaaaaccaaaaaacacagctgggcgaacggctgctcatcaaggaagcagttcatgttgtggagttcagctgagccgtagcctctttctaactcgaaggggtggtgggttttgccatccttaaattgaggatgcccttgttttctgaaggtctgaagcagcctgcaccgctcgcaccgtcctttcggcaaaaccaaagacacattgctcaatttcagtccagcgtatgctttgcaattcagtggccaattgagggtccatttgtaaaaactgaatgtggagaaaatgatgacaattttgacaacaccccaccccaagtctggccataggagaaaacactgcatcatgtagagaaagagctgggtctggagaaccggctccagctggcacagaagctccttttctagatggttcattccctgtggctttgctgaagcctttggtgaccgtggctgctttcatgaatggcgctggaatcacctgacaaggatttccaagcagccatcatgaaaagggctcaaaaagcaatgacaggttctctggaaacaaatgaaacaatggaacatctcggcaaagaaataaaacttatgaaaaggaaattaaaagtatagaactgaatagaataatggaaataaaacactggatgggctcaaaggtacagtagagatggcagaagattgattagtgaacttgatcgaggactcatcaagggaggggctcagtgtagacaagagagaaaacagacctcagaaagcaagggctgcccagggcggcacacactgcaggacagcagacagtgtgggaacgacagcaggattcttcccttccctcgccggctccttgtctctccctctgtgtctctctgtgactctgtttctcccctttttgtctctctgtatctgtgacatcctctacctctctgtctctccctctctgtgtctatgtctctgtctctctcatctctgaactgtcagaatcacaggaggcctccagagcgtgttttgtcccccttggttgaagaatgaaagccaccctgtgaaacctgtggctcttgtgggtgcctgcgtggagcactggcgggtgcctgcgtggagcactggcgggtgcctgtgtggagcactggcgggtgcctgcgtggagcactggcggcagacaggggcctgatgtgggctgcaggagcaggccagctgcttaggggcaaacccaatttggggcctgcgattttccttagtgatagggaggcaggagctgtaaccagagcttgctctggacagcactggctgaactgatgcccatgcacagaggaaactgagccatgggcctgcaggtgggcagtcctgggagagcactgggaagcccatgggcagctggccgcaggcagagccagtggcaacaggatgcagccatcaatctcaacagggagggttgaaacttttaaggtaaaactaagacaatctttcatttgtctctcactttgtctacagtgatcatatttccaggtctttttcgggatagttcctgtcttaaacatccaattctcacattagaccaactatattactttttggtatattactttttgccatgtcagcatcactgaacttcacttttggtagccataatcaagtgatttattagagtgtcacaggcacaggtccttcgttcattaattcacaaataatataccaagtgcctgtctgtatatgccatctgttaagattcaaccgtcatccaaacagaccaaatatgctgcagctggagcgtgtattgtatagtgcagggagagattctgtaaacatcacacagaaatcaatgagacatttcatttaccagtgatatgtgtcatggaggaaaacagcaggtggcgggtgggaagtgccagcacctagggcggtggtgcaggtttacatcaggtcatcggggaggtgttactgagaagtgacatgaacagagacttgatgaatgggagcaaagaaaggaatgatgtgaagatctgggaggatggtgttgcaggcagagggaacagctagtgcgaggtcctggggtagaagcctgcctggcgagttccagaacagcagaggccagtgagagtggggagggtggtagctggctgacgaggtcaaggaaggaataagggagcgattgtgtagtacctgcttggccattcgaaggacttggccttttattattaaccttttttttgtttgttcgtttgtttgcttttttagaggcagggtctttttctattgcccaggagggagtgcagtggcagatcacagctcaatgtagccttgaactcctgggctccagtgaacctccagagtagctaggactacagcatacgtcaccatgcccagctaatttttaatgtttttatagagacagggtcttgctatgttgccccggctgatcttgaactcctggtttcaagtgattctcctgctttggcctcccaaaatgttgggattacatataagttctaggcatgaactaccacacccagcctggaccttattttttagagcagttttaggtttccagaagaactgagcaaaaagtactgagttcctatacactcccttctttcagcccacccactttcccccattattaacaccctacattagtatgatgcacctgttacaattgataagatgatactgatactttattattaactaaagttcacagtttccattagggttcactgtgtgttgtatgttctgtgggttttgacaagtgtataatgacatgtagccactgtataatatcatgcagagtagtttcactgccctgaagtcccctttactccgcctagtcatccctccctcaactcaacccctggcaactgttgatctttttaccgtccccatgttttttttttttaaattacatttactggtttattataagaatattgcaaaggctacagatgaagagacatgtagtgcgagctatgggggaagtgtcgcacagcttccatgccctccctgggtgtgcccccttcaggaacctctacgtattcagctgcctggaagctccaaaagttttatcttttccagaatgtcatatagttagaacaacacattctgtagcctttctgatcggcttctttcacttagcaatatgcatttaaggttcctccatattttttttttttatggattgatagcccatttctttctatcactgagtaatcccattgtatgatgtaccaccgttttttctccattcacctattgaagtacatcctggttgcttccaagtgttggtaattgtgaagaaagttgctataaacaaatgtgtgcagggttttgtgtggacatacgttttcagccccacgtgggtaaatataataccaaggagcacaattgctggatcatatggtaagcctacatttagctttgtaggagactgcccaactgccttctagtggctgcaccattttgcattcccaccagcaatgaatgcgagttccactgctccacattcttgccagcatttggtgttgacagttttgtggattttggccattctaataggtatgcagtggcatctccttgttttaatttacatttcttttataatatatgatgttggatatctttttatgtgcttatttaccatctgtgtatctttgttggtgtttttttcagatcttttgcccattttaaaaactaagttgttttattaatgagttttaagagttctttgtatattcagaataccagttattgattagatgtgttttgcaaatatctcctccctgttggtggcttgtcttcttgttctctcaaggacttcggcttttcctgagtgaaatggggaggttttaatggttttgagtggaggagtgacattacaggcaaattataaataatgatagtaatatgaaccaaatggaagatcagtttataagtggtttttaaaaaatgcatttcccaagtacagattgctacacatcttattcacaactatggccctattgatttcagcccaccctgctgatacttgagttttgggtaataatgatctttttgtcaacctttttattactcacagataatatgaaagtcccaactggcccatctttcatgcaagaggcttttatagcccacaagtgtccttggccaatgcttcctgccctctcttcctatcctctcacctctctctctagggcagccccaactgctatttatagagagatgtgcttaactgtggatgtcctcagctgtttccagtccccttatttcactttcttcctctgggtgaatggctccctcctgcttcaccatctcctctccaaaatgagcctgcctctttgcatgccttcaaatcccccacaagttaacatgtggatgaaaacagtttcttcctaggtggccgggttcagtcttctcttaggtggctctgagacttgaacttgcattaaacacagctttgaagcaaagactcttgagtgggaaaggccaggaacaaaacactgcatgactgcggagctcccactcttgccccctgacttcactgtgtgtggagctgggtggcagtaggacacttcagaagcaaatctgagtggtggaggcaaacaaaggcagggccgccataaaaaaccctagacgtctgagaacacaagtatgaacagcggagtagcactcgggactgcagggacaggagctgccattctcaccaaggtgccttggtcaagaataggacattgggttattggtgaggcagagtagatacaggaggcagcatcccggcagagaacagactgcttgtgctgagggtggacatgaccctgcctcattttgaaactcacccagacaatgactacacagctagtacccaccttggattcactagcacatttccgtcagaggccacagccttctccataggtgtctttaacaatgggcaataagaaaataatcaccagccatgctgaagtgcactcagtgggagagggaacatgccaaagggtgggaaacaatagagcaagggagcttaacaagaaagtgatgggcagctctgattcacagaatgccatgccatcatttacagtctgtttccattaggtcacaagcatgaaggtgaaagaaaaaagacaattattccacgtgaacaggtgaaagaacaatcttcgaccaccagactcaacttgagttgtcttatgaatctgtactgctctcagttttcttgtacccagattcttcaagggcacatggaatggtggctgccgatggaagtggcgagacctcaacggtgcccaccccagctgcacttgcttcctggggatctgcatcgctgcagcctaaccttgaggggtggcagggcaagtgctgtttcccagctcactctcattcaacaattaagatacaactgctacgttttcatctaacaatactgggagaacaaaatacgactcaatggtgaaatgtattctgggttatctgatgaagttttatctttaaatattttgttatccatttttggcattgctatgaatttgggactgttgccaccaactctgagggattttaaactgcttttagagtttgtgagaaccaagcctcaggggatgcatgagtcagttgaagcactgtagtcttgttggtctctctttgacatttcatgtctctggcatatctgaatttaggttgggaactggaggtttggtacacttgtatctattactacccttcataatctggccagttccatactcatggaaaacaatttgtttgttcccagatggctgcagcatttcatttagagttgggctttgggatttcttgaagaaggaatgcaaaagagaaacatgctttaaaaaaggtttaaatttcttccagtaaacgacttgcttagtatgctgaagactttttgggggagcagcttacttatctggtatttagcagtcaaatccttggcatttctgcctgttgcttcatgttttccaatggatttggaggaagagttgtcctggagacttccaagttagctccactgacctacattttcactccatttaacattattgactgtggaatgagccagagtgccgtggaagagcataattcctgatcagaagacagctgcaatttaattagaataaagcagtgactaccatgtaattaaaaattagatgaaccattgaatgctaagcggacttctagaaggtgaacttaggatttcaaacctaccactgcatctctgcatgacatggtggagatctgccctatgaagaccccagcacgctggcagcccatctgtcttgaggactgttttgtgacgggggagtcacgttggcctgaggggaagaataatagattgggagtggtcatcgtcttcttctctaatgtatttaataatacttgcacatgggacaacattcaaagggtacaataagtagagagagaaaagcaaatttcccttgttcccttgtcctccatgcccaattctctttccccgtagggaactcttgttaagtggcatatgcttgcagagacagctccatgcatttctaaacacctacatacattttcttcttgctttttttttttaaaaacacaaaaggtagatattatccacggtgttccccacgttccctaccacaccaaacataacttggagattgtgacatatcaggatataaagctgccccttttttaaaggctgtatggtagtggtgatagtctgtttgtggaagcattagaattcatttaatctgtcctctagattgtttccaatcgtttgccattacattgtgttctaattttagatgccgccaggaagctctccaggttagggccaggcagaaaacagatagatggcacactgaacagaggtggtttatgagacgatttatgaagtgagggcaggaagaaggacaacctagaagagatgggttaatgacagaaaagtcattaactctccctgaccccgaagcgaaaggtcaagggaaggagggtttctccagccagtgagagctgtagttacaggagaggctgcctgacaggagccatggtcttccgcgagtggtgtgttggtaaatgttaaacacctggctgtctgggaggggtggccctggcgtgtaccgtttgctgatttctgtgccgtaggtacttacaccagggctttaaaggcaccagtgtgacggggtgacacccatacagcccactgtgagccagctccagcatctactgctctaggcccctgcttcctgccagggcctcctattggctcaaccccaccagaagccagagagcagggaagcctggttgatgcagtcctcagaggctggtgcaggttggtgaaatccacgggctgtgtagttttggacctgacatttcagctgtctgagtccctgttttctcatctgtaaaataccagaactacctcaaaagttttctgtgaccctttcagctaaggttctttgtttcacttactccgtgatgagtggatttggtgacctaagtgagttaggtcatttagtgcacagttgctgactgtttaacatgagacatcggtgggccctgcagttagggagcttatgtctaatgagggagatgagatgtgcacaagtaggtccagccgtgttgtaggtctagctgtggacagaaccacatgcattcagaggaagtgatctttcatacctggggtgtgagatttgatggcaaagacctggggtgaccttcattctgtggttgggagtctgcattattctccaagtaggaaaaaaacagaacacttctagagtcagtctatatataccactaggttctctaagtatggtcctgataccatcaatgtctacagggaacttgttggaaatccaaattcttgggttccaccccaccttctgaatctgtgttactccaggtgattctgatgcatgtagatgtttaagaaacactgagttataccataccagtggttcccaaacctggctgaaaatcagaatcagatgaagactttaaacatacacacacatgtgcacactgacgctaggctcctgggctgtacttcagatctatgcagaatcagaatctccctggggagataaatacttctcagatgtgactattttctactggtgatcttaattgttgagataacattgaacctgtttaattatttgccttgctgatactgcttgttcttccttctgtagtggtttttttactcaaactctttcaaagtttgagagtctttaaattctgagaggtggcagctgtcttagtcggctctctgctttggttgagggtggagatgattgttcctgccctggagtagttggtaaggacttgacatgaaaactggatagctgtggatgcttctgaagtctgaccttaatgttgctttgtgattaatttgcagcaaattttcatatcacacacactgcttatcaaatattaagtacaaaaggcatactttgaaggaaaattgtaatgattctgggactatgtctctgcctggttagagttcttgatggaaaagcctggagtttattaccacggagaatttggcacaggatttctgaaaagtgaactgggcagagttgttggtcacttgaggcctgagttttctgaatatttctggagactacatgagaaagcagacttccccacccctttgaattgtgaaggctttgctgattataaataaagctatgaacattgctgtacatggctttcagtggacctatgctttcatctctcttgggtaaatacctaggaaaggaattgccggtcttagggtagatgtatatttaactttgcaagaaacggccagttttctaagcataccatttacactcccattagtcgtgtctgggaattccagttactttacatccttgccaacacttgatatattgtcagccctttccatttgatccattctggtggggtgcagtgttatctgtggttttaatttgcatttccctaatgactaaagagattgaactgtttttcacgtgctcactgaccattcgtttgtatagcttcttcagcgaaatattaaagggactttcagccatcttgtttgtatcacaatattccaaacatgtttttccaccacagcttcacccatgatctcagctgcccttttttactcgccatccttgagaacaccctggactgccaaaatggcacacctttgagatgcagttccatttgcctcttcacccttccaactcagaggtcacctttttttttttttttttttttttttgagacggagtctcgctctgtcgcccaggctggagtgcagtggcgggatctcggctcactgcaagctccgcctcccgggttcacgccattctcctgcctcagcctcccaagtagctgggactacaggcgcccgccactacacccggctaattttttgtatttttagtagagacggggtttcaccgttttagccgggatggtctcgatctcctgacctcgtgatccgcccgcctcggcctcccaaagtgctgggattacaggcgtgagccaccgtgcccagccgaggtcaccttttatgctggttaagcctctagccctgccctatctctgcagaatttaggtttccctctgccatgcttctgtagtgctgagtctacatctccgtggccacacttgccatgctgtgtgcaagcttctgtgcgtctcactctttgcattcaccgtgcttatgccatcatctgccatggagtctaagcccaatattgctggattaatttattacccatttcatcctcccagccactctgtgcaaaaagatgtgttagccttaaatcagggacaaaggcatagacccaaggggtcaagtgacttgtccagtgtgacacaacatatttgttatacagccaggcactacttactataaagttttgactctttgacattacagttttccaaacaagtatgttttaggtacagtgttctttgacctagcttgctacaggtacccatgtacatgtacagaaatatttttcaagggatatgcaggcacaggatggttttaagggaatccacttccagaccctcaacttacatacacagtcacctaaaactgactagccttagaaggtgccaagccatggaagacatgaagctggttgggccgtcccatctcctctctcatgatggccattctcccaattcatacagaaaggcagactttgcacctgtcatcttcctgaggtgcactgctgcaagatggaaaacttccaggctatgtaacaaagagacaatgagaaatattgatggtattaagaagtcaatgactttaacgactgaaatgttgctactcaggggtttccacttcttagctttcacagaaatcaaaggagacctaatcaagatgttaataaatgatttaaaatatttttaacttacgagagaccatatctggactttgtccatgtaactcagaagacttcaaagagttaagatatatcatgacaaatctccttgcgttttcaagtatttatttttgtgaacaaagtttttccgggtttgcataaaaatcctccaagacaggaaaacaagcgatgctgggccatacctcactctagcaaaaagtgatagtcattcaggggtaaattaacaaactaaaaaaaaagccctatacatttcattaaaaaaaccatttctgtccgggtgcgatggctcacgcctgtaatcccagcactttgggagtctgaggcgggcagattgcttgagcccaggagttcaagtccagcctgggcaacatagtgagaccactatctctgaaaaaaaaaaagaaaagaaaagaaaaagaaatacacttccagataaaactttgctttttatatgtaataatttataaaaatggtaacatattgttttcatcatttgtgtactcataatagttgtgttaactcagttcagaaaaaaatcatagcaattagattcttatggcttaatactcttaaatgtagagtcaattatcattatttgtggtagttatgttctagaaagttaccttgatcattgaattactgacaaatgcaacactgctctgaggagaaatatagcgttaggatccacgaagactctggccagaacattttgccaaccaatcaatacataaccttgttttatgtgtatttttgtttgaagatagcttatttaatataaatttcttacaagtactcatatgcagtatttctttataataaacactgtgtttcagttacagcattatgtactcctatgactgtactagtttaattctcagtcataagtacacacatgcacacaatacacatacatatacagtactcacataacacggaatactgtgaacatgctttatactgtatagcacagtaataacaaatacataaagtcctgaaaaaagcattaagtgaagattaagcatttaaagttttatacacattaactaaagtcttactgtaatggagctgcaggatgtgtgatggtcagtgagtgcactgtggtttaccctatcaaccttagcttgccccatgaaaatcaaaagaggctggtggaactcaccctgcacaagaggaagatgtcagtaagagcagcacattgtgatctggcagagctaccttaggagtttgtcttttgcaacttgttgatggtgttggcaactgtctctcaaactggctagaaaaattggttcagccttgtctgcctggctttttgcctcaaatctttaagcatctcagaataagggataaatgcagtggaagtgaggtgcttaaatgtgaggccacgttcaagtacagggtcacattcttccatgtcattgaaaatgttttccaaggcagaattctattctgatattttggctgctgtgagaaggacaattcttggagtcttagggtgactttcatccctgactatgctcccatgttttgccatctcatccaggtttttgtttgtgggttctactgccttctctgacaaaatttcctccacatcttcttccttcatgtcattgaaaccttctccacttatttgccttgcaatatgcattgtttttttacattgttttttatattttctgaaacaccttcaaagccttgaaaagttttcacagagtctggccaaatgttttcccagcagttattgatagtagcctgcttgatgctgtcccacgctgtgccaacataatcaataatgctgcgtatagtgagtgatttccagtagtctgtcatggtggcttccttgttggcgtcaagagcctcacaagctttacaataaagttccctcgtgtagtgtgccttgaaagtttgtattatgccctgaggggctggacgagagatgtagtattgggggcatgaaaagaacttctttgttggggtgagcattttcaagttcatcgtgcaatgaactggggcattatccaaaattaataagacccagaaagcaaggtttttgccctagagatatcgttcaacttctggaatgaagcagtggtggaaccaatcccagaatatttcagataccagccatgcttttctgttctaccgccaatggactggcatgcagttcagatttttccctttaagggctcatgggttttgggctctgtacaccatcagaggtttgcacttaaagtcgcccttggcattggtgcacaatagcaaggttgaatgctttaaagtcaggggctcgtgtgaccatttacattacataggttcatttgccaacattcttataaaacaagcagtctcatcagcattgaaaacctgctctttaccataaccctttaacccttttcacgtataacacttagcagacattttaaaaattcttccgcagcctccttatggcagaacctgccttgcctgcaagtttaaaatttgatttcatgctgtaccgccttttgaaacgtgccagccagcctgcactggctgagaagggtttaatattttcctgaccttgggtaacatggctgtaaatttctttggctttcagcctcacaacaatactgctcactacactacaaaagtccatatatgactttttttattggttgtcgtctcatgaatccacaattttagctgcttttccatcttttccatagcttcatcacacactatagatgttactttagcactttctggagcagcctcatgtacagatgtgaatgcactgtattgttgattcattaacattgaactcatggccaacagcactataactcatgcccgaacaaagcttatctaacacatgtattttctctgttaagacacatcacagccttcttgcgcttagggacattagacagcatttcagcactacgtttgggggccatttgaaacagaaatcaccatcggaaagcatagaaatttgaaaaatgtgacactaagtagagtgagaagaggacatatgtttacagaatgagaactaaaaaaaaaaggcagagcatggccttattcaagcacagctgggaacgtgtacataaggtgatccaaatttttcactgttctgcttgtgtccatatatgactgagagtgcttcaagtattgatttttgggttacacataatttttagccaagtagctgagttcataaatacagactctttgaatgatgattgactgtatttgtagaggttacttgccaaaaaagagtgtgtttcaagcataaaaatagactatatgaggatacaactttttgggtgaagtggaatgaattaaaggagaaagaattaatgtctgacttgttcagaaactttttagatggagaaatgggtattatgtttctattacacttagattctattggatatattttttataaaggatgcaatggtttaatttaaaaatgtcatcagaatgtcagaaattacatcctttacaactatttaaaactatgaagaaaaaaattaggtattacctagatatgtgataatttttgaaaattattttaaagagcaaaacggattaggaagcagctttgcttttgccattccactgaaaaaatgtacagtttcgatggaaacatgtcagcacttgcttgaaggaatttttcaactatagaaagaaaaaagcttcatttcatcccttttggcattgctgaacacttggttttgatgtataattttaaaacacctgagcaccataaaatgaaaccacagtattcctgagtagcctggtgaaatgtcgtgattttctcctacagtacagaaggacaaaaatgcctttaatgtcctcaaatgctagagttctagatgacgcattagtttaaatgtcaacgcttaatgtcttcacatgtaatttggaacataagttttcttacagttaaaataatccttagagcaaaaaacaaaataaagtttttcgtatgcctcaggcttcttaaaattttctagtaattggtactgtttctggtttccttagtttcttgccgtgggtaaggtccaaacaccttacatgtgttgctggtggccctcacaattctaccttggactaaagcactagggagtctgtaggcgccttcctgcgctcctccactgcggtggatccacaatttcttctcagctgacttactggttttcatgttaactatttcggttaatcattcatgaagcgcgtggcttatatttgggaaaacattgcaccttaatcccaacatgcataatttatgttgcttaattattttaagtcattgcattagaatagtaactgcgctctccatgagcctaggctagaaagaagggaaaaaatcccaggttctctcccaacgatcaggggttactcaagccgcccgagttctctggggcccctctgggccaggctgcgtccacttgggagaggccgaggacctggcgccaagaggcggcggtgtctgcgctaggggccgagcgggtgcgctgtgtctgcggggccaggccaaggacctggagcagggaggaggccgagcgcggagccgggccttgtcggctgcgtccgcggggctagggtagagaccgaagactggacaggaggaggcggcggtggccgcgcgcggggccaaccggtgggctccctctaccggaccgaggcccagcactgggccagaggaggtggcagctcgccggcaaagcagggtgggctgcgtccgcgggggcgaacacccgacgctatccgaagacgtcccgcgcgggccggcgggggcgcggtctgaggacgtcacttccggcgccggggctcacttcctggtgcgggaaggggcagagattggtgcagccccggaggaagaaaaaagggtgaggagaagcagcggctgagcgggttggcatctggggcagcgggctcgctccaggccgtcgggggccgctcgccagcgtcgcccgctgtgttgggagcgcgggccgtgggcgtcgctcggccttgtccgcggcgtccccgctgccggccacggcgctcagcgcttgtgctctgtattgcaggtctaccccgagccccggagcgagagcgagtgcctgagcaacatccgcgagttcctgcgcggctgcggggcttccctgcggctggaggtgagcgcgggcggccacgggccgagggaggggccgggaagacggggttgggcccggggtgggtgcttcgctccagccggacctcctgcctcctccgcgcccggatccgaccctccccggctgctcgagagtccgggatgtgtggaacggggcgttgcgggtttgggtaatggccgggaggtggcggcgcgcgggccacccccagggcagggtggagtctgcgtgtggaaccccagacattgctctcgttccagtgaggaagagtggttctggtcgctggtggtgcaggtgacacacattttcaacaaccgtttatcaggggtgtgaaccgatttcttggcacctgcctcagcatgaactctgcttttagagattgtcatctaagggctggcatctaggtctgggtcaggccttagaatcctcagcaggtgatcaggcaaagtcgtgcagaaataaaatgggccagccctccgcctgcttctcccagccgcactcctttctctgctttttcttcctgagaccagaaattcggtggtttttccgtaccctcaacacttaatgtccagagaattcacattaaccagtatgtgacgtttataaaacatgctgtcggggaacatactgggcggggtctcgattccctgttgtaaaatgttgtgtcactttactaaacattgtcttttcagtctttcagtggcagtttctgggaatttaactctttcattttattttgctattgcgattcttcctacacttggggtagcactttaaatacagaaatctagctttgcttttcttgggatctgcttaagtggttgcagtcagtcctgtacttaagtcctgccgtttatgttgccactttgtcactcttaaccttagttttcttatctgtaaactgagatgggcaatatcaagctcccagataagagtacagtcggccctccgtatccaaggttacccacccgtgtattcagccaaccttggattggaaatactggaggagggggaaaccaattaaaaaaaaacaataaaaaacaacacagtataatgattatttacatatcatttataatgtactaggtagtgtatgaaacctagagatgatttaatgtttacgggactatgccattttatataaaagacttgagcatctgagggttttggtatccaccgggatcctggaaccaattccctgctgataaaaagggacaactgtatatgaaagcatctttgtagaacctgttatgtaggataacccaacagaggtttcccttcccgaagaatattttgctataggtttctcggaaaacctagaacatcaaatctgtgagggcaggttacatggaaagtttatttaattgaattagacatgtaggaattcatagattaaagtattactggcgttgtttatgattgtaaacacaaagaaatttattgttggtagtatttcatgttggcaaggaaattattacacgtaagtgaaagtgctaggggagattccaagaaacttagggccttttcaaaggggaaaaagacagtgtttcagtagtctttccctgataccctttgtcgtatcagctttgtcatttgtaatccagctgccttattggctgtgataatatgccttgctagtggcaggttttactttttcttcacctttgtgagggattttattatattatcctcttgaaactactgagttttgtttacgttaacatacttttgaaactcaattggcacattaagattatctgactttagtgtaaaactttttaaaaaagttttgttttaaagtaaattgaggctgggtgtggtggctcacgcctgtaatcccagcactttgggaggccgaggcgggtggatcacatgaggtcgggagttcgagaccagcctggccaacatggtgaaaccctgtctatacttaaacaaacccaaaaacaaaaattagcccggcgtggtggcgtgcacctgtagttccagttactcaggtggctgagacaggagaatcccttgaaccccggaggcagaggttgcagtgagctgagattgccactgcactccagcctgggtgacagagcaagactccctcaaaaaaaaaaaaaaaaaaaaaagtaaattgaatgttaaaaacttaccgtttttagttttccaaaggttgctgacatttcatacagtaactattgtttttataattaagagtttatttgaaggttttctggaagagagttttcactaacatattccaagcatctacaatagtgcttggcacataataggctttcaataaatatttgttactaatagaatgaacttgaggttgtaagtgatagcaagtgagtttcattttaaagtaaaaaattagttttgacttattttgtgctatttttaaagagtaaatatctcttccagtaaatttaagcaagaggcaaatgttagcattcttcaagcttagtgtgagtcacacttgtaattacctaggagataataaaaatgaaaatatgaaaacagcacatgaaaaacctgataaattgttcagtcattgtgttttttgggaagttaccctgagaagtcattttgtatgctatgcatccagctctggcttccagccttgtaaggtgatgtgaagggacagggctgggccctgaaggacttggtcatctcccatgcgggccacagtgcagcaatttcccagtgtttaagaattgcttagggagtcaggagggaagggccttgcacttgtgaaatatgttgtgggatttacacatttcattttcacaaaattctgaaaggtgggaaattgataagaaatgttttgaaactacagacacaaaacttaaaactaatagcttaaattctagattagcttttgttctatagttgtaaatgtcaaggtgcttttcttccaggggttagtttagactgaattgtgtttgtaacagattgtttttggtgtatatattcttatttactgtcagtttaagctctgctaagatttgttaaagggaaaaaggaagtaaacttggttaatatgtcagctgttttggtgcatgccctccttaattacctgtagaaaatcagatattatcccccaattgttttgattatgaaaatatttttataaattggttttaaaggaatattgtgtgagtcgcatttattggtaaactttgagaagcactgggttttaagctggaaaactttgaaatttggaaaattaaaaaaatttaattactgttggaaagcagtgcaacttggatgacttcattttcttataacttttttacttggcatgcttaaattttttttttttttccagttagggcaaaaaacccctaggcacacaatttctatttgtatctcaaaagcaaccaaaataataattattaataagaataatgatgatgttggctgggtgcagtggctcatgcctgtaatcctagcgctttgggaggctgaggcgggtagatcaccttaggtcaggagtttgagaccagcatgaccaacatggtgaaaccccatctctactaatcacgccactgccctccagcctggacaacagagcaaaactccgtctcaaaaaaagaaaaaaaaaatgatgatgatgatgatgtttgtagaatttcacttgaggataagtaacttactgaggcaaaccaagcaagtgataggacatttctttgcattttcttaggtaaacagctacagagaaattcagagtgatttctgtttccagtattttgctatgttactgtggaattctgattcaagtgttgtagctactgtaggatgtgtatgtgtgcatgtgtgtgtgtgcacatgcttgttcactgaaaaggtcacaatgaattagcttccaagatgttcccaccctatgcaacattgtctgattaggcatctgacaactagggaagcaggtgaaatgtaactggcaaaagcagattttatgttcctaggagaaagcttgtttggttaaagccatcacgcctgtaacatgtttaccagttttttatttcaagagctgaaagttaaggatataagattccagttaattgatacattattaagctcacattaataacgtggtttcaggaatattagcaacaaaattattataataaagctatggattttaacttagttctgtttgaaagaaagatgtctactgttcttgatacttagctatattcatacataatagaaaagggtaatcttgatggatagtttgatattaatgaggcttttttgcttaagaattgactgtgggctcacatacagtgttaccatcactacttgaaaggaaaacaaaacatttcagatgaaactgggtgagcctgttctcatagttgccaagagggaataaagccaatttgtcaagtgtaaggaaaccacagctctttcttgtcatagaccatttctggaatagttatgtttgatatgatagggatggtaaccctaatatattaataattgatctttccagctccttggcactgcaactaatactaaaattatctgcaggtttcacagttgctgttcatttatttaactgtttttctggaaaagtggaaagcatccaaaggcccaggtggttcagaacagaaatctgctcttttctcatcctcacccttggaagtttttggttggcttttggtctctcagatcaacagagcatgaaatgtagaccagctagtcacataaagcttgcctcatatccagtttcttttctttaattcttatattttgtttttaaattgacaaatagttgcatgtatttatggagtaacatcattatgttatggtatatgaatgcattgtggaatgattaagtcgggaatgaacatatccgttacctcacatacttcttatttctttgtggtaagaacatttaaaatctaatcttttagcaattttgaaatatactttaaattattgttaactgtagtcacctgctgtacaatagatcactaaaatttattcctcccgtccgactgaaattttgtaccctttgactaacatctcccctttccctgtctagctcctgtttcctccttcccagcctcctcagcatctggtaaccaccattctcttgtctgcttctgtgagttcagcttttttacactttacatataggtgagatcgtgcagtatttgtctttttgtgccctgctttctcttagcacaatgttctccaggttcattcattgttgttgcaaataacaggatttcctttttttaaaagtctgactagtattctattgtgtatatatcccacattttctttattctctcatctttcagtggacacttagattgattttatatcttggctgttgtgaatagtgctgccatgaaaatgggagtgcagacatctcttcaacatactgattttagtttctttggctatatacccagtagtgggattgctggatcatatgataattctgtttttagattttggaggaacctccatactgtttcccagaatggcttcaggaatttacattcccaccaacaatgtgcaaggcttatcttttctccacatccttgccaacacctgtcgcctttcatctttttgataatagccattctacagttgtgagatgctctcatgatttgaatgtgcatttctctgatcattagtgatgttgaacattttctaatctgttggccatttgtatgtctttggagaaatgtctgtttgggtcctttgctcatcattttttaatcaggtttttttttgttactgagtttttaaatatattttggatattagcttcttatcagatgtatggtttgcaaatactttctttccgttctgtgagttgtctcttaattctgttttgctgtgcataatcttttcagtttgatgaaatcccatttatcttatttttgcctctgttttcggtgcttttggggtcatatccaagaactcattgtccagaccaatgtcttggagctttccatggtgcttatttctggtagtttcatagtctcaggtcttacatttaagtctttagtccattttgagttcatttttgtatgtgttgtgagacaaggttccaatttaatttttctgcatgtggatatccaattttcccagcaccatatgttgaagactgtccttttcccattgggtgttcttggcacctttgtcaaaggtctattgactgtatcatgtgagtttaattctcagctctctattctgctctgttggtctgtgtgtctgcttttatgctagtgccatgctgttttggctgctatagcttggtaatacactttgaaatcaggtagtgtgatgcctccagctttgttctttttactcaagaatgctttagttattggggttttttttttttgtgattccatgtgaatttcaggattgtttttctatatctgtgaagaataccattgtaaatttggtagacattgcattgaatctgtggatcaccttggatgttttaacagtacaggttaagcatgctgactgatacggtttgcctgtgtccacacccagatctcatcttgaattgtaatctgcataatccccacgtctagggagagacctagggagagacccaggagattatggggattacaattcaagatgagatttggagttagagatcagcctgggctacgtggcaaaacctcatttctacaaagaaaaaaaaaatctattggacagtgctggatccagtagaatcctaggagatgggatcatgggggtgatttcccccatgctgttcttgtgataacgagggagttctcaggagatctgatggttttataaggggctcctccccctttgctcctcacccttctgtctcctgctgccctgtgaagaggtgcttttcgccatgattgtaagtttcctgtggcctcaccagccatgtggaactgtgagtcatttaaacctcttttctttataaattacccagtcttgggtatgtctttgtaacagtgtgaacgtggactaatgtacatgccaaacctgaaaatccaaaatgctccaaaatctgaaattctttgagtaccaatgtgacactcaaaggaaatgctcattggagtgttttggattttcaggatttgagatgctcaactgataactataatgaaaatatccctaaatctgaaatacaaaacacttctgatgtcaacttgtgtcacttctgagaatgtgtacatgatgctgagtagcacagagcatgcttgtggcatgggtgctaaatggttagcttggcacactcacagctagtaattgtgactttgatcttcagctgatttctccttttttgattcagggttattgctcactcctggtagctgcccatgattatcaggtatttgctttgcgggggacggtatagggggagggaatgtagtgcctgaccccaacccctttcctgggttgctgtcctgtgttgccactcgccagctgtgccatcaggaaaatgggtgtcacacgtgcttgccctttgtgtctgtcgtgaggattacataaattcatgcaaaactcttagaacagtgcctggtaagttggaggtgccaaagagacaatagctgttattatcatttgcattattattctttcgtgtagttggagccatatggtatattttaaatctttacccagggttccatattcattttttaaactgcagtaaatagagctatgtaagaagaaaatgaaaagctgtataatgctaccgtttagagataccagtgttaaaattagtatttcttttttggtaattttttttttaaccattgcaaatatgtaaatatatttttaaaatatccatgacatcatagatacatgtaatgttttataacatgctttaatttgatccagtgtgagtcttttcccatgttaaataattattttactactgattttaatggctgcctcttagttcctggtaataatccccatttttggatacagaggtggattctaagtttccacggttgtgaacagtggactgtgcaatggacatttctgtaccacacccttaatccttgattttctttgtaggacaaattccctgatagggcactgcaaggccaaaggtgggggctttcaaaggctttgaacacctgctaccatacagcttccagagaacttttgccagtagcagtacatgagagtactccttcctgtcctatggatgtcctgtggacagctgtcttgaatcttttatatattttctttcccttaggaagatggaaaacttgttatggataaacattttggcttttctatcttatatcttccacagtgctttatatttctggggagattgcaaactaaaataaatgtaagtcagtcaacatttcctgcattggacttttgaaagaggatgtgaaagaaaagctgctagaattggaaataaaagttgaaaaccctagaaatttgcagtgttatcagctgttgcacaagtaaccttgcatggcactgggtgggacattcttgggccactctgtacaagctggagttctggctgtaaatgcatcttgagacggtctgcaaaggtgagagggcaggttttcattttctcactttacagtcgagagacttcagaaggagttcaggtgggcagtccagcatcgtaaggagctgggataatttagtgagtgagaggttttggaaaagaaattgccttacctgtttctgaaacactcatcttccctgtgtatttctgaaggacaagttcttttattatactgctctgcctaatgctcagttctcttttagattttttttagccaagattgtgattaggatttcacccacaagaatagttaaaaatattaacacttttgaaagaattaaaatgtgggaaccacttactgaaactcaaaacttgttgatgcaggcttaataattaattgcaataaaaacagaagtaaatctatagtctgggatgggacgcccagccaagtgttgtctttgttctagattcagacagatgaggaggtaaactgtttattgaaacttggcattgaaggtttataagcaccaaagatatgtttgaggcattctttttagctgggcacccttctatactgttgataccaagcgtgaaacggttggtcacaacatagtgtttattgactgattcattgaataagctgttgaagcttattcctgtgtaggactttagttaaggaagttaagtaaaaatattgtttgggagaagaaatgagtaactattccctgaacattttgtaggtagtttaaagaaagacagtttccattcagatactgtaattgtgttttaatttcacctggcaagaagtgtcaagagatggccctctgtcttgtaccttagtgccttgctgtactgtcttgctgggtgaacatgaagtgttctggttatccaggctgcttttctagtgtagacagctagacttcccccttcgtttcagatctttggaatgtcttctttgtctagatcagcactgtgcagtaggaatatactgggagccacagatgcgattttaagttttttagtaactactttaaaaaagtgaagcaaagttaattttagttttcatttttaaatatttatttatttatttatttatttttgagacagagtctcactctattacccaggctggagtacagtggcgtgatcatggttcactgcagcccccaccccaccaagtaccttagactacaggcatgcaccactatgcctggctaatttttgtatttttttgtagagatgaggttttgccatgttgcccaggctgatctctaactcctgggctcaagcagtcttcccacctcagcctcccagagtgctgggattataggcatgagccgctgtacctggcctaaagttaattttaataatgcattctatttaacccagtgtatccataaaattatttcaacatgtaattgatacatattaatgaggtattttagtttcttcacattaagtctataaaatcgtgttggaatttgttatggccacagcacatctcggtttgtattagccacatttcagttgctcagcagcccatctgtgagtggcccccgtattgcgtgttgcgtttggattatttaagaggctggggaaatacggtgatctttgaaatgaaatgggacccaggtttgttgagaacaaattgtgtgtctaggcattttccttgtactgttttgttgaaacctcacgatgccctgcagagaagatggcagttccccacttagcagatcaggaggctgagacttgaagtggttcagaagtcacaggtcccggctcagccagtgaagagatgcggaatttgaactgagatgcatccactccactggctgggttcttcatacaagcatgctgctgcctagtgtggcattaggtgaggtgtttgacaacatcaaggcaatactcttaggctgactcctggcaaggcccatgggcaagttctcaggagaacttacctggtgacagggcctgcctcgtgggtgtgcgactagtgttgccacacagggccctgtgcttggtttcatgctctgctgttgccatcagaaactcttaagaattttttgataaggagctttgcatttccaattcgtgctggaccctgcaattgagtacttggtctagcctgctggtattgttcttagaggtctgtgatcaataacaggattaaacagcattttctgagtgcctattatggcctaggccccattatgaagtgtgtgttaacccggtttgaaagtagctgtctcaagttgttaccaccattttcctcacacgattgcatccgtgaccccaggcaagcggaatcgggataagaataaccctcaacaatccctgctactaaagaattgcttaaagtacttcctcctgataggaagttaagataatttgttgtctctcatgcattaaaaattgccacagcttccaaggcagccaccattttacctgtcagtgataaggacccgtgataatattggctatgggttttgtttttctaaaggatccttttgggaaagccatcctctccagtgttgggatgataaaaggatgggaagtcggagtcagcttgaacttaccaatcagagaacatgtaggggttgagtggaggggaagatcctctccaaggaattggagagaactttctactcacattacgtctaactagccagaggatgggcactgggactgtatacttgtaaggttccttcaaagcctgaattgtgtgagtcagtgatgcagctactttctagatgagctaccagtttaataataggacttagccccagattcctctccctttttggcccttgacatgggacacagatcccttagtagatgttcatgcctggcccatgtgggcagccgggtaagtctttccagtgcagctggtcagttggtctcacccaagagttgcatcacttgtatctccgctggttgttcagcaagtactggcagcacttaacacgtgcagtaaagcagtgaggctgttttgccaccgtgacaatgcagttgagttttgcctaacgtgaaaatactaagtttctgtgtattctctgctacccacaaccagaaggcttggaggaacaagcgttctggtttgtttatctgcatcccttccccttgataaagcaactgtgaatttggtcttcattagctgtagtctgttgaaccgactcagtatagccagggtagaggcagaaggaagtgtcctgcacagcggtacagctgagggcttcgtgctcctgagttcgtggcacaagagagggattcagtggtcagctctgcatagtctctcattttctagcaaatagaaaccagagtggatggcctcatatgtgtaagttctcatgagactcaaatggaaattagttgtccctgaggttcttcatgcttggctgattgaactagatggtttgagagggatattttgtagattaaagggtgagattagggctggggagaacaatggtggtagagtggccttaaagaccagcctccaggaaagcctctggcagttggagtccccactccctgccattaatcatctgtcacatctggttcatcttccttttactaaccccagaatcttggcttttctctttgcccaccaccattagcccaggctgtccacatccctcacctggatcactgcagcagctcctggccagtctatccttgcttttctccagactgtttttttctgaaacgcaaggctgattttggtcattttcctcctgactctgattttacctaatgtcttagaatgaaacccatgacccttggaagagatggggaataataggaagtgaggccagggagtcgtggggagcgagatcaggtggtcctgtaggtcctgtcttttcctccaagtgatatggagcctctgagggtgtttgggcagaggggagaagggatgtgatgtaagttttaacaggatcattttggctgtgttttgagtatagactgaaagactcaagggcaaaagcacggaaaccaaagaggacaggatggcaccaatccgggtgacctcccaggtgatggtggctggaaccacagtcccgtcagcataggtagcaggagagactgaattctagtttttatcaagagggtagagatgagatgatttacagatggactagatggggtatgcaggagaggagtcaaggaggaccaagggtttggcctgagcagttagaagaagttgtctttgggatggggaagtctggcagggccagatgtgggcactcagcttcagacatgctccatcaggatatctgtgagatgcctcagtgaagatcaggtctggacttcagggatgcggcctgggctgggatatcagcttcagacttcggcacaagcaggttctgattgtgtagagtgatgttcctgttagtctgtatcatgtggaagagtgtcttaaacacatattgtgggcaggtgctgtggggaggaggacatccatgcctcaaagagaatgaaggaatacctggtgaagggctgggggaggaagtgaggagatgttagtcccagaacattttaggcccgctagacgtgcgtactgacgttgctcatttcctggccaagctgtaaccacctgagtaaacggttggtttgttcttgggtcaggtgtatccacagcagtcattcagtgcgagggtacttaggtcctctttatcgtcagaaaatcacagagaagcaccatgcaaaaataggtttgtggtcatatagcgtgaaagttggcaaagatatgatctctgggctatttgtacgtgagcttagaagaaactgaggactcgtcatcaagttgtattttatatttcttttatccaataagacttgtacatagcttaaaagataaacaatacttagagcctcaaaaggaaacacagtcctcccgcactctccttatcccagaaacacactctcagctggtgtttcttcttggtctttacttcctcctttccatattgtatcctggcactgttgtttcttatcagttttagttaataactgtctaagatgagggtgtagctctttgtatcactcctatcccccagttcaggagaatcattctttgccctgcatgtgtgacatgatatcccttggtgcaatgttagttgttttagccaatgttttttcttagttataaatgacatgtgtgcattctgagcaaacagagtgttacaggcacacgtaaagggaaatgtccactcttctctctccctcctaaataccctaaccctgcttcctgcaggagccactgttgaatgctgaggcacacacggactctttttcaggaactgaggccatgctaggaatgctcttgtgcagtttgcctatttccactgagaatgtagtgcctttcctgggggcaccactgtggtgggcagcacaccagagcgtgacagcgacataaggcgctttccggaggacagaacaccagagccaccccttcctcacaggacacttgaacagtaaaactgaaccttcttgctgtgacagtgtggagttatggcaggagagcagggtgactgtccagcctcgataatgttccctccttggcagagtgaggtccttctgctcagtttgcctcttgaggagttgggtaccaggagcctgaggagagggtcctggcttacctaggtttttcctctctcgtccaggtcatagggagactgtcagggctgagatggccagggtagctggtggaaggtgctagccctcccctgtgcctgcttctctgcctctgccgctctcccgcttggtctcatctactctgtctctgcggtgtgcgacagctgtgtgaggccccactgtgcgacagctgtgtgaggcaggggtgtgggtcccctccaggcctgcccagccacctagcagctgttgccattccaggctcagagtccccgcctcctgcagatttcttcaagcttcatgctgccttgaggataaacacgagtggagagttgacacttttccttccatgtctttatgttctcagaatgttccaagaacttggaatattaacagggaaataccagggtttctgcatagaggtggataaaataggcaagaattgttcaggttcagtcttgaaaggtaatgattgaaaagggatatccttatagattatacagttttgaaggctatgaaagggtttcagtaaattgtccattcccacccccagaaaaaaatcacagaatcacaaaacttgggtttagttttttgaagcttgagagatgatttttgaaactaaacaaaggaaatattaaagatgtaaaaatggcatagttttgtggttttgatatgttgactccaagaaagtgatgctgtgttgagagaataggttccttgatgactgatcgccagtgaagtgtttatggaagccaggagtgttggatgacatgaggagggtaggtgacattgcttctataatatgttctttgatgcctgtgccagagaggatgcagacagcaactcagtattcacaatttgaagcagaccttatcatttctcttttaatcagtagttctgaactttttggtgttcagtaattcgggaagttggcttaggtaacaaataatgacaatagtagcggttaagtttggggatgcttactgtggggttgtgccaggcagaggcaaatccgtttaacatgtactagtttacttaatccttaaaaaagtcacttggcattgttgggaagagaagaaagtcgtgtgttaggagagaattgcagaggtcgttaatgccactgtattagtctgttctcacatggctataaatacctgagactgggtaatttataaagaaaagaggtttaatgggctcatggttccacagggtgtacaggaagcatgatgttgtcatctgccctgtttctggagaggcctcaggaaacttacaatcgtggtggaaggcaaaggggaagcaggctcgtcttaactggccggagcaggagcaagggagtggggaggtgccacacaccttgaaacaaccatatctcaccagcacacactcatcatcacgagaacagcaccaaggggaaatctgcccctcacgatccagtcacctcccaccaggccccacctccaacattggggattatacttcgacatgagaaccaagccacatcagccagaggcttcttcctggtccttgcgttggtaaccaggaccttgcttgtgagacattattggaagattttttggtggaattatatttttaactttggagtcattcttactgtaaaatatatttatgctgttacagtaatgaacatttaatgatcacctctgtttgctagacaccgttctagttgctggaggtggcttggtgagtaagggaggaggggccctgctcttagggagtgtaattctagttggggagacacttaagcaaaggaatgagcgtgtgaacaaataaaactgtcatgcgcaacaactgcagaatatcagggggtgaggtgagagagcacctgagtgctgacttagattgggtgatcagagcaggcccctctgcagaggtgacgcttttagagattgggtgatcagagaaggcccctctgcagaggtgacgcttttaggatttgctctcacagccaacgtgatacaagctagccactcttctttttttgtagacagagtcttgctctgttctccctgctggagtgcagtggtgtgatttcagcccactgtaacctctgcctcctgggatcaagcagtactcatgcctcaacctctcgagtagctgagattacaggcatgtaccaccatgcctggctaatttttgtatttttaatagagacgaggtcttgccatgttggccaggctggtcttgaactcctggccttaagtgatccacccgccttggcctcccaaagtgctgggattataggcgtgagccaccgtgcctggcgcagttagtcaatcttctgaggaagaccaaacgtggacgtcagaattgctcttctgttgaccattttcttccttcttactggaatttcttcttattttatctcttatgtagggaagctgggtgagaattgatcatgttactggcgttatcaacggccttgcacaaggctgctcactcaagccttcctgcctttactgaatgcagtgctaagtggccggggaaagtgctgtgtgttacccttaggccagattcactttctggaaggttctagaaggttccttgttgggagatgatggtggctaccccaagggtctggctccgctctgggaggacttgggagaactctgatgacggatggtgcccaggcccctggaagcagagcctgctgctgtgtgtttgaggtaaaaatgggagacctgcttgttgggtacttgggacaagaagtttgatttgggaatttaatttatggcagataacagataatcagtctcagtcttttctgttgcagatataaaaagcagcagtggttatctttaatttttaaaagcattttatcctttttctgttgtttgtgtccataagaaaaatgcatgcataccaaatatccatcataaaatagggaactaagaattttgtgtgcactggattttctttttttaaaattattgtttgaaatctgttaaacaagggcttgaactcaaatgaaagaactggcttttactttaagcttaagctcaccaatgcactcttagagttacttttgttcagggctctgtataaccaaatggaattagcctgaggaaggtacggttttttccacagcattttgtttgtgatgaggaggctaagatagtttaaactgtgtgagctggcactgttgtaaccataaagatttgaggtatttgggttttggttgtagccaagcctagcttgggagctgcgtgtgcaggagtacaggtgtctgaacagagtgtggctgctcagtgctggatgaggctctttggtgacagtctttgaaagcaaattaaaaaaaataaagtgaaaagcattaaaaataatttcactttgtttatagagttacactttaatatcgctccaggttacatgcttgaatctacaagtcctttcccttcatgctttgatcttttagttgaggaagttggctcattatgtatgtgttcaatttgcatgagcaatttttatgtgatggagtaaacatcagtgtgatctttgaagttagcttggtgaatgcttttctaattggggaaagctgttaaagtttgatttcaagagaaaaaggaatgagcctctaaaaacaaagctcttctgtggctgccatggtctgaatgtttgtgtctcctccccaaattcccatgttgaaatcctaacccccaaggtgacagtattaggaggtggggcctttggaggtgactaggctcatgaatggggttagtgctcatataaaagaggcctcagagagagacctctgcccccgtgccatgtgagtttgcagtgagttcatctgtgaagaaacaggccctcaccaaatactgaatcagtccatgccttgatcttggacttcccagttccagaactgtgagaatacatttctgtggcttatgagccgcccaggttatggtattttcttacagcagcctgaacggcccaaggcagtggcagagagcatcagtacacggtaccctgagaaaacacgttcgtaatcttgacgaggggctggtactctaaatacgtaagtagctcttacaagccagtaagggagattgtaacaaaatgaattcagttctttaaatggaagcactcactgatcagtgctctaggggcctttagagcatagtctctttggaaatgtggtcctggaagtatatattctcttaatatccctaaacgaaataaattcagttctataaatggaagcactcactgaatcagtgctctaggggcttttagagcatcgtctctgtggaaatgtggtcctggaagtatatattctcttaatatccctgaagtcatggcattctccagttccaagtcacgtggtggtgccgctctctaaggctgcaggtaagttggtgatcacctcatcctgtgacagtgtcacatcctctctgactgcttctgcccttcacactttttgggaaccatttcctcaaagaaactcaagccataataaaacttggttttaaaaaaccagcctcttttcttgcagtaaatttgaactgtcatttgcacacttagtaaaaacaccctacagactgggttaatagcagagagaggggtcctggtgctgtaaaccaaggcttggcagttttctgtaaaaagctagacagtaactatcttgtgggggctggggtggggcagacctctgtcacaattattctgccgttgttgtgcgacagcagccagagttggcatgtacaaactaggcatagctgttttctagtcagacattactgatgctgcctttttctcccgattatagtagctatgtgtgtagacaggttgagcatctcaaatatgaaaatccaaaatctgaaacgctcctggtcccaagcatttcagatgagggatgctcaacctgtgtatagaaataaaaactgcagaaaagtatatgaaaaaaccattccacttgtatcattaataagttacctttattaacgtgttgctgtatttccttccagcattttttaatgccatttgctcactctcaacccacaccttttttcttttcacagagttggtgtcagagtgcacacagatcctgccagttacctcccccagagcatgttgcgtttctgggcagaaacagcctagccatggttggggtggaatgcatactgcctgggagggctggccggtctcagagcctggcagcctggaggggtggtgtgcttggctagcttgtcttgatattttgcccccttttaaagtcttccagtcacttttatcttcacagagtagcagggtcatactggggagtcagaaccaggaaaattaccaggagtttgaccaattccaggcctctgtgtctgtcttgggaggatgctccaccttcgtacctactttgtggcatcagttggagatgctctgtagcgtaagctcagccccaggatgtggagggacagggcagagtgctcactggggacacagtgtattcactgattggaagcctgtgaaatttcatccacggattgctttcccaggaggttggcaatttggaaagcacattttggatgtgctgttagggtcagctttaagtcggcttgtgtttcatggctgccaagtgagcatggagaccactgcctctccccacattgaatggagatgtctcgtgtttgaggatgtcatttgctacctgcagcacctggtcttggagggttgggaggtcagggggtgggtggggtgtgcccgtgagacaggtgcgggtgtctgtagagggatgtgggtgtcattcagttttatcaggctgcttaactgcttgtggtggtgtttgcattgcactgactgggtcaacttgtgtagtgattactatgataaaaaatttacttaattttcaagacaaatttgtgatctccgattggtattaataattcataaggtagatttccctcctttgtctggcacccagccctccccctgtactattcggataagattaatgaagcgcctgaggtaaacaaggtagaatccgtgttagcttatttcagtgtaaaaggtttgttttgaaaaaaggaatgatatttgctgctatttaaaatctaggtaatattttatagagactgctgagatattttgggattgaggataattaaaattggttactcttatttctcagagcttatactctaagatcatttactgatttttacatttaaccacactgttaaaatgtccagacggcagtgcctgtggaatccctctgttggcacctgttgtgtattggcatcttcatgtcttccgaattcttcaaggcttttttctccccctttggtccttgacagatttctgcccacccagcaaggaagaggccatcttgctgtcttctgtcatctccttgtctgtctccctttcttgctcttccttcacctttctcgcagtcttgctcttgcattttatgacttcctggtcattacaaggagctgggaaatgccatgcattatctgggcatacgtggcttagttcactaagttttcctgtagtgctattttgagttcattgtcttgccttagttaaagtagacatctggagggccactttgctccagctttgtgaaaacacaccttctgggtttgccctgctctgtgtccacaccccgtgcctcagctgtgctagcggtctggtccatctgtacgctgggggtcgtaagcagaaaggagaggaaacaccgggaggtccttgcagctcctaggaagcagtttgctgataactcagctaggcgtgcgaggactagaagttgctgacagtcctcgggttggttttgtgcagcacatgtgcttgtgcgtgtcgggtgaaacctaaaagctccatctgttgcctgtgtctcgggatcttgctgtctcctcctcaaccgtcctcctgtgttgggagcatacagcagtgtgaatttgactcttccctgttttaagttgaattaaattagattgtagcctttccacaaggtagatctgccttctgggagtgggacgagcttctctaaattgaatatttgtttgtggtaagctgcttatttcttttcgtaatagttcactgaaatagccactaaggagttgatgggataattcagcagctgtgcactgagggcccctgtgggtcccacactgtcttagaagctctagagtcaaggcccacacttgtatggttcagaatgtacagaggacagacatgttcacaacagaattcctggcgctgatggaagccatgaagaagacagagtgaggggagagtgagggaatgggagagggtgagagagcagggctgccctgtgagactcaaagcctgggagcacctctctgggggccctctcagtcagggtgttgccatgtgagtgtggggaagggcacccaggcagaagagtgcctgggcaaaggctctgagatggaattgagcctgcctgctgcaggctggagcctgcagtggggtgagtgagcttttgggggaaggactggaggccccaggggcgggcctcctaagctgctggctcctcactgggcgtcctctgctccaggcgctttgaaaggtattgccttggacgtcctcatagcagccctgggaggtgggactgcccacttctctttgtggataaggagactgaggcacaggggttgagtctttctgaatgtgttagtctgttctcacactgctatagagaactgtctgagactgggtaatttataaaggagaaaggtttaatttactcacagttaacacagggctggggaggtcccaggaaacttaacagttgtggcaaaaggggaagcaaacacgtccttctttacatggcggcaggaaggagaaatgcagagcgaagggcagggaaaagccccttattaaaccatcagatcttgtgagaactcactgtcacgagaagagcatggaggtaactgccccatgattcaattacctcccactgggccctcccatgacacgcagggtttctggaagtagaagtcaagataaagagttggttggggacacagccaaaccctatcagccacacaggtagtctgtcaccagcaccatgctctgcctaggactctgagcccccttctgtaggttgatggaagtgtggattttagtctaatgatggccagaagctgctggaggattttaagcctgatcttttacccatagaaaatgcgaccattgctgctatgtggagaatgactgtaggtgagcaagatactttttgatgtcaaattgcagtgtttgaggtgtgtaaggcagtttctgtttcctgagaattgtgcgtgatgtgcctctccccctctggcatctggctgccatttgtgtggtggatctggttagatggccggcccctggaacttgtgttttgcttcctccccagtttcttcctaggtcccactctctcctttctcttcactgtgtgctgtgccctgtggggtgacccacgtagcccctgcctgccacctgtcactgcctaaacaccctccctgggaagtttcccatcaggtagggtcatgtccaggagtgtaaccatgatgagtgggacccccgcgtgcggacgtttgtcctcctcttgtcccccatctgctcttgagctttccatttcaggcgtgtcacatgatctgagatgtccttaggtagtatttgctgactggcttatttatttatttatttttttagatggagttcactcttgtcacccaggctggagtgcaatggtgcgattttggctcactgcaacctctgcctcccggattcaagcgattctcctgcctcagcctccccagtagctgggactacaggcgtgtaccaccacgccccactaatttttgtatttttaatagagacggggcttcaccatgttggccaggctgttcttgaactcctgaccacaggtgatccacccgccttggcctcccagagtgctgggattacaggcgtgagccaccgcgcccggctgactgacttattttataaataagtggtgtgtattctgtgctaggcgtggttccagtgacttcaccgaattaactcatttaaacctgtaccagtgctgaggaagcaggcatcgctttgcgggagaaacggaggtattgagaggcctgggaactgggccagggccacacagctggtgcattgtggccggggctgaggctgggcctgttgtgatgcacttcctgtctctgtgcctgcgtgcatattgaagaaacacaaatgatgttgtgttatcgtccttttgtccctctactctcaaaggagtccacattcttcctgttgcaaactggtcaaggcccattggtcattctgggagctgagctcaggcggggtgtgagatgtgctatcagtggagtcagtgtgttctgaatgcggctggaatctaaggagcaggtctgtgctcactgaggaggggagggtcacaccccctgagaatgtgttctcagtatccctgagccgtgttggtgagtttgcaggttctcacacggtcctgctggcagtcccattaggcactgctgccccggtgccacttgtctggactagctcagctgatgacgtttgtccttgggactgtcactgggaaggcctctcactagcctcagacagagtggcccagactgggtaaaaggcatgtctttctgggtatgaaatatgtgctatcttgaatatattagctcacgtgcatttttcaacatgctattgaacaaggatgtttgatgttggccagatggtggggaaaaaagtgttaagaagggtatatgttgttattttctaaaagtccttgtgaaaaatgaagcagacagtcatgaccagtgagtgggaacagtgaagcttgaactcgcacgcagtgtggtcccgagaaccctggaatagctcacctcctcttctccatgcgcagggaattctgtgttcactcagtgcctgtcctttgacctccttcctctctcctaaacttcctgtttctcagcttgactgaggctagtaaagcagggttctttgatcatcttttagtcattgcttttctattttcatttaaaaataaagcaagaaaatgccagctgatcttgtagggatgggaagtcctcctctctctttttcttgacaggcgcttgccctgaagcactctgagttcctgaggagttcccttatgtcctgggaaccagcgagagaacaggttcccagtgagtaattacaaaaacacaaaaccctgagttcttttcagaccatatttagatgtgcagtctacatttaatgtgtttttaaaaatagcattcttatccaaaatatgtgtttttggccagatttttgtcagtttaccttgtatgttttctgtgatagtttagagaaagggagtggtcttcagttcagaggtgatacagtattcagatggaatgttcactcttgccctttagggaaggtttcaaggttagattgggtggtatccacttgggattctgagtatgcgagtgtttttaaaaaatgctgaccccagcatctctctggagagtttctgactgagttagcttggtacttagcgctgtccagctgggcatggtgaggagtgccagccatctgtcagggaggcagctgccggtacccacccagcttggaaaaggcagggaggaagccacacttttctctaactgtctcgttgtagaatgggccagcccagctatgctgagagtttgaggggaagattagtgtggcagtgactgagatctttaagaaatgtcgggccggtcagaaggattgttcatgtgggtgtttatttgcacgaaagccccacagatgatgagtgaaatgctttattttcctcctaggctacggatggtgagcggatgctagagagagccacttaatgtgccgtcccccccctttttttttgttttgaaaactttaaaagtaacaaaggttgggagactagagttcggtgaacatccgtgtgcccttctcacaggtcaccagcattctgagttcaaatgcctgttctttttttttttttttgagacagaatcttgctttgtcacctaggttggagtgcagtagtgcaacctcaactcactgcagcctctgcctcccgggttcaagcgattctcgtgcctcagccagcctagtagctgggattacaggcacgtgccatcactcccagctacttttttttgtgtgtttttagtagagacagggtttcgctatgttgaccaggctggtcttgaactcctgacctcaggtgatcctcccgccttggccacccgaagtgctgggattacaggaatgagccactgcacccggcctcaaacgcctgtttctgttttattttgccaactgtgtaagtcatgttgtagatcccatgatccttacctctgaatacttcagcatgtgtatcttaaaaataagaacattctcctacataaccatggtgtcattatcacacccagaaatttaacgttgtgttgccgtatgctatatcctataatgttatcgcttatgcaacccatattcagatatctctggtggtctcagaatgacgtttatggcttttctttctgttaaatgtaggatctgaacaagggtcatgcattacatctggtttgtctctagtttattttcctgtaggatcgtttttctgcctttatcgctttaacgttaggatttgacgcttttgaagaatccaggcttgttagtgtgtagcatgccctacagtctggacatgatttggttcaggttagacatttctggcatgaattctgcataggtaatactctgtacttcccattgggtcccagcggaaggcacttactgttagtgggctccgtcactgctggtgccacagttggtcactaggttaaagtgatgtccaccagatctcggttataagggtgcctttccctttgtgcttaatccatggatgatactttacccccaaacgtttcactgatgcttctagcatccactgcctacgtgcctgaattacttcctgttatggtggttcaggtggttctcaggccctttgatttgaggctttctttagggcctcaggctcctgttggcactggagggtggtggtgggcatctaagcccgcaagttgtgggatgtgggagaggagaaaatgttactttgctttcaagaatccaaagattctataacatttgtgaacttagtcatttacttctgaggtctgttttacttcccttacgagcttttcattaccaagcaaaaaatcagtctttgactcagactgaagccatgaactgaattttatccatgtgagcttcaggagtgaatagaaggaagttgattgacagggaaggaacacatacagataggatattttccattttatgagaagtaacggtggaaatacagaagaggtagaaatgtaagattctttaaaacatgcatgacaacagcttagtagtaacagctgctgcttccagaggagcttctcagtaccagaagccccagaaggctgtgttgtaaggcagagatagtgatcacactacaggaaggagaagctgagatgtagagaggttaaggaagatgcccagtgtctaacatttactaggtggcagagttggtatttgaatccaggtttatggtgatttcagaacttccaaattgagaattaaagatcagctccaacaagagaatgagagcagtacagttggtggaagattatagacacctggaaatttaatctttatggggaactatatactgtagtgtccataatgttctgcattttgaatttttaatacgtgtgtttatatagataatatacataatctgcatcatgcaactggaaggacatttaagatttaagatgtctgattgcaaaaatgttagtgttcaaaatgccccccatcattctgggcatgatgtgtaactcagtgaaggccgttgagtgtagtgaaagacttactacttggaaaataaattggagcaggtgaatggccactttaaaatttgagtagctcctgtccctgttgtatttgctaattgtttatctcttagtggtgaatttattcaaaattcaaacttcaacaactttatggattctgtgtgtattggttacattgtgaaatacattttttagtgtggatcatggtcaagagtttgaacattgatcacatgggggtcttagaaggatcaggacaagggaactttggaattggtaaatttgtgtattaagggtttcaagttgtcccaacttcaaattttacatccctttgctgagagaagacctggaaacctacttttgtcttgtttatggcagttgattggaatcttagtttagaactggcccctggaagaggtggaggtcattttgtaggacttggagcatgcccagaaagagatgggacaaagtcatgagatcctttgactggggcatttcttggatagatcatgttttttttaaacaacaacaacaactggggagcatagtctggatttcattgtggtggagaacttggagtatttctccaggtgctgttcatcagtttgcactcggttctgaggaagtgtcttgagctgggtgccttgccctgagggagtatagaggtgaacaagatatctgtgccctgaggcatcatggaacagtgcactgaagtggaaggaacccatgtaacctgaatagggggcagcagctgtaaatgcttcaagagaggcgcagctgtcatggggttgggactcagagaggggaagaaacattccaggtggaaacaggaaagagcttcaggtaggaagcgacctttgaaagggcagaggggccagacatcatgcaggtaatgctgctgcttggttggcctgtgagcttttcaggttgatgtgttgaactgaaccaacaaagcgttgtggatttggtgagctgtcctaaatgtggagtcaggggaaatgtgaaaagcctgcagcattgtgcatcttgactgctaggggatggaataacttgaacctgatgtttgttcagaggaagctgggagggttttattcacaagagtggccttaattcacaagaattggagaccaggagggtgagaacaccgccgttctggatcgcagcagtctcgttgatcttcacggtgtcgagcgtgctggtgtgccgcctccatacgacaggtccctgttcgccggagggttcaggacttccttgggaagcatttctgagactcttttcctctgtacctaatggagcccccgtgttctctggccagcttccttccacggggtgctgagttactgccccgtgtgtcatacagtggaccttcaagctgcctttggtggtaaaagcttgtctgcatgtgttgcatacaaaaggcttttctccagtgtgactccatccgcctttaaatctgaggagccggagaggatgagaaggtcttcccacaccttgtgcatctctgttgcttggctgtgggcatggctgggcctcttaacaatggtgtcatgcccaggggtggggggaacgtggcctggggtctgacgaataccaggaacttcagctttgatggagttggctgggctctgataaacttggagactgctcccaccttccatctcagcgtggccgctctcagctctgcccccgccatcgggagacttggactagatgtttagaaagcagttttagggttcagagaaattgggcctagcatctgtgggctcatacagatatggttcgtcatctccagtggttcaacttacatgtttttttgactttgccatggtgcaaaagcaatgcacattcagtagaaacagtgcttcgagtacccatacagccagtttttcagtattcagtacgtcacatgagctattcaacgctgtgttataaaatatgctcttgtgtgagatgattttgcccaactgtaagctaatatgagtgttctgagcaaacttaaggtagctaggctgagctgtgatgttgtgtaggttaggtgtatcaaatgtattttcaacttcacgatgtttttcagtttacagtgggtttaacaggatgtaccccattgtgagttgagcatctgggtggccctacaaggtagaaccaaggtgtaaatagtcaagagttagaggaaggcagattactagcagtcacattgcacgcacgctatgtcattgtactcgtgctagcaagttttgttaaatggcgcttattttgaaatacatatgcagtggacatgtactgggagttagaaattaagtgcagaaggcagacagctatagcattctatagcatttggatgggagtattggcaccttttttttttttaaacaaaaatgttctcagtgaaaatgtggttataagcttatttttttctatttctctcagaagctgtctggcaaatgttttgattctttggatgttttttgatggggtctaccctcaggtctcacacctccggcatcatctgtggcttcgtcttttctaatcaaacctcctttgaacttttcatgttgtctgctgaaagttacatttgcatagcatcaaatagtgcataaactacatgtacattgtcattttatcaattattataaagtcctgtggatttttacctataaaccctcttctaatccatttcttctcttccccattatggcctctttatgagggagggaatttaatatacttgctctgtctctcaccttccccacagcccctctaaatcccaatttttgctaattgtaccggttttataattttcaattttttagtagtcaccttttaactgtatttctagtatttcttgacttgtcatcttagacttctctcctgtgtaaaagatgaggagctctgtaagtctccaccaggacttgtggggaagggttgacgggggtcacttgcttatggccgggtgcgggtgggactgcattttttaaccctctctgtgtggttggggtaggatggtgttatggtgtgactctgtccccacccaaatctcaccttgaattataataatccccacctgtcaagggcgggaccaggtggagataattgaatcacgggttggtttccccgccgttctcatgatcgtgaattagttctcacgagatctgatggttttataaggggcttcccctgctttgcctggcactcattctctctcgttgtcctgtgaagaggtgccttttgccgtgattgtaagttccctgaggcctccccagctatgtgtaactgtgagccagttaaacctcttttctttataaattacccagccttgggtatttcttcatagcagcgtgagaacggactaatacagatggttattgttgaagttttttgacctactaggctgccctgtcctggtcctttggctagagaggataggtctttcttgaggcttttcttctgtacctgttggtgtttctgggttgctggcttgtttagcactcagtttggagcatttgaggcaaaaagaaaacccagagaacccgctggcatggttcccagccctgaaacccttagccggtctgcctcctctctcacattctgaggctgacgtttgttttataggcagcatccagggcttttagctgcattcagctggagggagggggagatgtgtcttctccatctttttgggagtcataggtcagttctctttgtgctatgctgttatttcctatcaggtgtggccttgatgggttcttcctgtttgtgaataaaagcccagttgactggcatcagagcggaggggactgtgcagtcctgtgtgtgggttaccggccccgtgggcttcactgtgcgggttgtgtgtctgggagcaggtggggagaaccggatggagggctctagaagcagctacacgagcagagctgagggagacactttctctgcacctgtttcctgtgtcacacttcagatgggggatagtccaggctggtggtggagctcccaggggatttcgcttctgggtagaattgtcatttttttttttcctcagagactgttgtgtgggcctagtggtgcatcaggttccggttagaatccagtgcaggccgcaggcttctctttaattagagagggtcacttcacctccggttagaatccagtgcaggcagcagcttctttttaattagagaggggtctgggtgctgagcttcccatcaggaagaaggggctgtcgtgctgaagtcctgaggtgggtcacgtgtcccttcctgtgttagaaaaccgtctttggtgctcctggggctcccttacaagtgctgttctgaactgttaggtcattcagagtccatctgcgtcctgtccccagggatctcctcaaaccctgtttagactgctcatagcctttccctttttagcactacagcgggttctttctctgttaattttttgaagctttttctttctctcatttcggtggcaccttgggagggatgggagttagataggtgtttgcagtgggccatcttgagaaacttctcaaaactggagtcttgtaactgcttgcattttgaagttaatggaatgggcgcattgcctttatagctgtaaatgttactgcttcacttactgttagcccaagccagtgtgttgcatctgcccagatccttctttgtggtatgtgctcactttctggcgacagccaggctgttctttgcaggcatgtgctcctagcagtcgaagacagaagtttgggggcctgtgtaggctgtatgggctgctgtgtgtgtgtacgtggtgagttgtgtctgagaccacccctcctcccctgggtgctgcctgatctgcctgcatgaccgctgtgggacaccactgtctctggtgtcctttcctggctggcagtgtggtggtgtgggcaaagccaggctggtgggctccgatcttggttctgcctttgtaagctttgtcacactgtcttttgggagctcgtgtgtgtgtgtgtgtgtgtgtgtgtgtgtgtgtgtgtgtgtgttttcgttttctgcctgtaagataaactggcatgcagtctacactgaggtacgggctgtgtgggccagcacagcatgccgtggtcctaagcagggaggtgtccttcctttcccctgcctgttggggctgcgcttccctgcctcgtgtggaggttgcgcccggtctgcagaaggcagagagcatcttgttgggaagagccctgcctgccttcccgttgctgtgctcctgcctccctgctctgctcctctcaccccttcctggaaactacctaaaatacttggttacttcttttttgaagatgtattctctgtcctagtgtttgggtgttgatacagtggaatccacaaaattgaataagatttgattttcattttaaagtgaaataaatcatttgggtgcatgttgggtgaaagtgccgtaattgatagcatccgtcatcagactttaattttacccctggggtgtaggagtgggtgggattaagtacaaaatctgcagaagccaggaagtgaaaacgtactgctggatttctgtttttcacatgtccccaacaatatggaccatttgcattaaacttaaatagcaccacttatttaagattcattttttactcttgttctgaaatcacaagttccatttgacagtgataggacaaaattatatttttaaactttgcaaaccacactccagagctgtgctaaaaataacaatttcttgtgtcaagaataactttctcaagttcctggaggaggcgagctgactggtggcaacgcagaccactaaagcttcagtgagcccagaaagtgtgcgctcagtcccacattgcagaggcctctccgtcagtattgagatggtggaaagtgaggagaagcaaaaagacgactacttctttccccatttcccggtctggtctttttggggtctactacgtagaggtgcatcagccagcgctaccatggaggcaggaggcattcttttgctctcgtgtcagtactgacggggttgattaaggttgctgtgcttgttggtgtgggtattgggagggtggtgtgaaagcagttgggctggaatagagctggtcagtgtgtccttttgcgtgcatttgtgtggccctagtgctacagtggtgtcccttagctctgggggactgtctgaatttttgtgctctaaattattaatacatgtttatgtgtgggtttgccagaatgctgtgtccgttattgttggctccttggacagctctccttgttctgcttcactggctgtgaaattggttcacgtggtgggctctgggtccagcgagatgcatctgaggtgttgacctggtggtgtgggcctggggctgccagtggtcctgttgcctgatgagggagaccgttcctgaaactgtggcgcacactcaggagagtaggaaagagagcggagaaagccttccggttctgagcttgtggctcttgccattcctgacttgtttgttgtgcgaaccaataatttcctttttttgtttaagccaatttgagttgggtttacttgcttgtagtggaaaggttctgacacaggatctttattatatgaagtattttcataatgtacattgtgttatatattagacatatcacacgatctattttgtgatgtagtttgctttgctgtttttattctgtggaagatattcctgaatttctacacttcctatgaatttggaagtggggtgaggcaaagtcactaatatcggggtatcagtaggggagcctttcgaatcccaaacattggagtgtccttctgtgacccgtttctttgtcaacttttgtccgctaggcagagtggctgtgacatctgacatccagtgtgaaggtgtggtcactcagctggaagagaaaaacctagcactctgagagtgggtggatctgctggtgattttcaagcaatgtcttcccgtttttggatgctcatcccttctgtagttggagccttgttctcttttccttgagtacaggtggggctgatgactcatttcttatgaaccgagcacagcctgcctgactgctgaggctagctcataggattcctgaagctgcaggccctgctttccttcctgcgtgtgccctgggatcactcgctctgtggagtccgttgtccgttctctgaggactcaggaactgaggcctcctgctcacagccacgctgtggagctgtcttggtagcacctcctcagtccctgcaaggccttaggctgccagaatcccacagcttcagctgacatctcaacgacctcccctgagacccagagccacattcacccagctaagctgccctgaacgctgacacgcagaaactgagataacagatgcttgttgtttgggccactgagttttagagtgagttgcctgtagaaatggatgagcagcatctgtgcctggaggtgaagggtggagccaagtgcatgtctgtcagagtccactgctatccatcctttccctgcctgccttcctcctacacggtgctggatcccccagaggatcagcagccgagaggcttctgcgaaagaatgtgctccttcagggccgacttgcatttgtgtctttttttcttggagatttctgtaaaacagcagccgttagcagttatgtgattactgtgtttagaatttgagaagaaagggaaaaccttgtttgccatggaatacatactgtgttgataagtcttccttattttgaataatggagaattctctgtgtcttagccagctaagagctacttacttttatcatgttgtgttaaaatgataaaagttactcttcggtgacctaactgcttcacttaatgagttttgattttgtttttgcaggatgcatttcctctccttcaggaataagttctgttggggaaattatgaaatatggacatgttaccacctcctgctagatgatggcgtattaataaacagttcctacatttcagtgttttgcacccccaaaggtttattatgtcagttatgtgttagctgcagataaggtgttgctctgctccaagtgtctttcttcagcatccaggctgatagaacagctccattttgagccttgccattctcatttaaggaaaaaggataggaggttggctggaacacctgaaggcttccaaggcttctgcttagaaccagggtgctttctttcagcttggagctggtgtctgcctcttctgtcatattttgtccggaattggttccttctggtgggttcttggtctcgctgacttcaagaatgaagccgcagaccctcgcggcgagtgttacagttattaaagatggtgtgtctggagtttgttccttcagatgttcagatgtgtcagagtttcttctttccggtgggtttgtggtcttgctgacttcaggagtgaagccgcagaccttcgcagtgagtgttacagctcttaaaggtggcgcatccggagttgattcttcctcagagtaggttcgtggtcttgctgactttaggaatgaagctgcagaccctcgtggtgagtgttaacagcttataaaggtagtgaggacccaaagaatgagcagcagcaagatttattgtgaagagcgaaagaacaaagcttccacagcgtggaaggggacccaagtgggttgccgctgctggctcgggtggccagcttttattcccttatttggcctcggccacatcctgctgattggtccattttacagagtgccgattggtgcgtttttacagagtgctgattggtgcatttacaaacctttggctggacacagagcactgattgatgcatttttacagagtgctgattggtgtgtttacagacttttagctagacacagagtgcttattggtgtgtttacaatcctttagctagacagaaaagttctccaagtccccacccgacccagaagcccagctggcttcacctctcaatccgccctctaaataggagactccaactgctgttgggaattgggcagtgaccgctctagctacttcctgctggatagggatgaagaaggggccctgaagttgtagtgtcctccagaggagaactatttaggctagtgaaagggccagtgggtttgtccaggggcccttggtagaagttgttagttgagctcatttggggttccatttgtaagaccatctgtagcttgatagccttgattctagaggaaacacatttgaggaggttaaaaatacagggcccgaaggcgagtaatagcaagatggctgccacgggacctagaaaggggagaagccatgttgcccaactccagaggttcgtataagagtttgaaaggcattgtctgacttcagaagccttttcccgtaaacaccgggcagcatctcgtactatccctgactggttagtgtaaaaacaacactcttcccctaagaaggtgcagagtcctcctttctcagcagtgaggaggtctaggcctcggtggttttggagagtcactgctgccaaagagtctatttgggattgtagagtaaggatagatttcgttatttcttgcaaactgagaaatcctttgagagtgtgtggtagtaggataatgaagtagataaactggctactccggttcctgtagcagtagccattcttaaccctataagtaggggtattagttgtatggctctgcgatgacagacttgagctttgaggggtactgataaagtctgatttcctgaggcaatgttaatgttgggacttagaaagactaaggtgcaggtgcctgtccagttggtggggaggcagatataggtcgatgttccacataagaagaatacatcttggctgggtagacagaactggttgtgtatgttaaaaaggtgtgtgagtttgttgttttcattttcccatactcctagagtacttgccaaggtagctctggtgagtggctggaaaggggtgttgggagcaaactgagtggctccctgtgttctgttttcccattggagaaaaaactgttttgtatctactaggaaccattcattagagagagtgattgaaagaggggatgagaaagcattcactagtggtgggggcgctgctgcagggggtccaggggtgaatggtcatgcagggagtatgtttgccattacaaaacctggactgtttagggaggaggtgatgattttggggggccctgagaagtggacaagccgtccgcatggagctgtttgggtgacttggaagttactatgatcagttggggcttgaagttgtgaggtgtaattacactgatggggtggtaggtgccccaggggcaggcctgataacaggttgcattggatgcataaagggacatggaaagttaagatggtattcatagtaacagggccgtgtatgcgcttttcattgcttgtgtaatagatgaggttggaaatgtaagaacgtaaaagttggattgcacgtcctgttagggtattcttggtcttatcagagatggggaagttggctaatgattgcatatttagaagttggaaagggtcttttccttcataatgagggtgataggttaagttggtagagacccaggtttttgcaggaatgggagtggctacgtaagcagagattgatagatacaaagccaacagtcatttgtgagggaaggattggactggtttaacagagagtgggttgagagtcttgtagaggtatttaggagctagtggaaggggaggggtgattgtatgaggtatccaaggaagcaggagggatagatagtcaaagagtaaataggaaggtaaagagggtgctctggaagacgagatcattttatccaggctgagttaaaggtaggagtaaattgctgtcagaaggaaggaagatagaaagaaggttgataagattaggattttcgtcctagcaggagctgtagtatatagccctatcacaaagagtatggttagtatgctgcttaatcatatgatgaaatagtaaaaggattccattaaagggttaaggagaggtgttaaagattatgtaggttttcacttatcttttttaaggaggaaggggtttttcttcaggatcagtggtaggagcctttttagtctgggatatttccttccaaaacaggagatgcaagtcctccagtggttcgcaggtgtatcaaggctggtctggctgatcttgggactcctgagctgatggtcctgcaggtttctcagcgggtgtccaaaatttaactcgggtgtggtgaatccaagattccactcctgccaccttaactgcagtgggggtagagaggattaccgagtgtggtccttcctacaaagagcccatggatggggaggtagaggggagagatttgaccaacactagatctcctggttgaaacaactctgttcccttttctctgtgacatccttcaggtaggattttaaggttttgttgatattttgccaaagaagttatatctttgacgaagttggccgtttcctgatgaagtaggacgtcatttgtgagaaaaggtcgtccatacagcatttcatatggactgagccccattttgtgaggagaattttggattctcaacaaggccatgggcaaaagagtaggctatgggagatgagtttcttgtgttagtttcctttagtgcctcttgagtgttttgtttgccttctcgaccttccctgaggattgtggcctccaggcgcagtgaaggtgatattgtatccctagcgccctggaagggtaccgagttaccacggctttaaaagctggaccattgtcgctctgtaagctttggagaagcccaaatctaggaattatttcatgaattaggactttaatcacttcctgagccttctctgtcttgcgagggaaagcctttatccaatttgtagaggtatcaacacacaccaataattattgaaatcccttcgacttaggcatatgggtgaagtctaaatgccagtcctctccgggctagtgacctattctttgttcccttagaggggacttatgatggaccaagggattattcctttggcacacctcacagactttgactacctgtcagatggtccggaggagatttggccctgtaaatagggatttggccatttgatgagtgttttcaatacccatatgaaaagtttgttggagggttttaagtattttccactggatggctttgggtataagtacctttcctccttctgtcattaaccaccccgaggggagacaactatgcccccgtgaaagtccccattctgtttcagttggggaatactggggcttaatctcttggagggggttgttccataccaagggtccttccgtaggtatttctaatgggaggttcctcctggcagcaattttggcctcagcatctgccctgcggtttccttctgccttttctccttcacttccttctgccttttctccttacactttggcagtgtaagactgccacctccttgggtttttgcactgcgtgcaatgactccataatttccttgtggtatttaatgggggttccctcagaggttaggaactccctttctttccatattgcagcatgggcatgtaggattagataagcgtacttgctatctgtatacacatttattctttttccctttcccaattccaagtctcggttaagtgccactagttcttctaactgggcactggtccctgggggaagaggcttactttcaagtgtcgttacatcactaactatggcataacctgccctttgtattccattgtccaccaatgaacttccattggtatacaggttaaggtcaggattagttaaggggacttccaagagatcatctcgggcagcataagtctggactataatttgttggcagtcatgctcgattggttcgccatcctctgggagaaaagtggcagggttgagggccacgcatgtacatatttgaagcactggtccctcaaggagtagtgcctggtatctgagtaggcggttgtctgatagccataaacttcctttggcacctagtatgccatttacatcatgagtagtccagacagtgagatcctttccttgtgttattttgatagcctctgacgctaagacggccaccgccgcaactacccttaaacagtgaggccagccttttgctactacatcgatttccttagttaggtatgccaccggttgtggggttgtcccacgagtctgagtaaggactccaagagctattcctgctctctctctgatatataaagagaagttttgtcctgtgggaaggcttaaatctggagcttgtactaggttctgctttttaaggttttgaaggctgtttctgtccctggttcccattctactagatgaatatttgccctctgggtctccttgattagagtatggaggggcctggctatctcgctgtatccggcagtccatagttggcaaaacccagtgattccaaggaacccctgcaactgttttaatgtcttagggtgaggataagccagtataggccgtactcattcctttctgagggccctggtccgtctggctaagattaggcctagatatttgacctgctataggcaaagctgggccttcaacctagatgccttgttcccttgatcagctagaaagttcaggagatctagagtagcccactgacatgaggcttctgaactggtagcccaaagtaaatcatccacatgctgaaggaccagagtgcctggacttgagaagtggcctagatcttgggccaatgcctgaccaaacaggtgagggctatccctaaacccttgggccaagactgtccatgtaagttgggatgtgtggtctgtgggatcctcaaaggcaaagagaaactgtgagtcagtgcaggggaatacagaaggcggcatccttgaggtccagaatagtgaatcattctgcttcctctggtatttgagagagcagggtataggggttgggtacaactggatatagaggaattactgcctcattgatgagtctaaggtcttgcactagtctccactgacgattgggtttttgtacccctagaattggggtgttgcagggactgctgcatttccttactaagccttgagctttcaaatgtttaacaatatcctgtaatactttatgagcttcaggccttaagggatattgcctctgataaggaaaagtggtgggatcttttagcctgatttggactgggtgggcattttttgcccttccagattgtctttccaatgcccagacttcagggttgattccctcctcaagtaggggacaacaaatgggtaacttgttccccatattcgtgtagataatagctccagctttggctaatatatccctccctaataagggtgtgggactttcaggcataacaagaaaggcaagtgaaaagagcaaagtcttccaattacaactgaggaggtgggagaaatacctggttacaggctgccccaggattcctcggatggtaacagaccttgaggatagtcgtccaggactggagattaacactgagaaggcctcgccagtgtccaagaggaagtcaatttcctggccctcaatggttaaatgtacacggggctcagtgagggtgatgacaagagctggcgcttgctctgggcaccgtcagtcctgttgttggatcatctggttgggggcttctggcccagagaaccattgcactctggggcagtgcgccttccagtgattgcctcggcatagcggacatggatgagggggtggcttctcgttggacagtcttttttaaagtgtccttgtaaaccacactgataacaagccctactgggtgattggccttttccattttctgtcttctctgaaccaccaaggtttgtctgtctgagggccatgactaaggctgctgcctttctctgatctcgcttttccttttgggcctattcctcttggtccctattatagaacactgaggttgccaggtttagtaatgcctccagattttgttcagggcccagggcttgcttttggagctttctcctgatatctgcggctgattgggtaataaacttatcttttaggatcaattgaccctctagggagtcgggtgacagggtagagtattttcttaaggcctcctgtagccagtcgaggaaggcagaaggattttcttcctttccctgagttatgctagacatcattgaataattaatgggctttttcctaactctccttagtccttctagaacacaggtcaacagatgtttatgactccagtccccatgatctgagttgagtcccagtggggatccatactggggacgacttgctgaccggtagggaatttgtccctttcttcggctgtcattctgtcatttacttgactaagataccaggtatcaccaaactctcgggctgcagctaaagctgcattcttttcattaaagactagggtttgatctaacaatagcatgacatctctccaagtgagatcgaaggtttgccctagaccctgtaggaaatctatcaggatcatctgaaaacttccccaggtctgcctggatctgctttaaatcagagagggagaaggggacatgtacccagcttgggccaaattcctctccccctacagcttgaaggggacataaccgatagcccgggggtttttgtggtcccttggagatttctttgcttatttccttctgggcaggggagattagaggaggcttatcattaataggaaggggagctatagggaggctaggatatgggggtaagctgagaggtcctcctgtgggacataaattgcaagctttgcatattctccttcaatgaaaagaaagctggacataaggtatttcaatccatttgccttccctcttacagaaaaggtcaagctgcaggatagtattgtaatttatacttccctcaggtggccatttttacccatcagagagagaatactggggccaagccatagtgcagaaaaaaataagctgcctctttttcagggtttctgggtcaaattggtccgaatggcttaggatgcatttcaagggtgagcatgttgatgcctgagtgtttcccatctgaaagacaaaaccacctgcagttttggtttgtttttctccccctgcccaagaacctataatggtccctggaccctgctgatcggaatagttgcgctcaccgacgcagcagcagaaacacctcttgcccaagaaccctggaccctgctgatgggaatagttgtgctcgccgacgcagcagcagaaacacctcttgcccaagaaccctggaccctgctgatcggaacagttgcgctcactgacacagcagcagaaacactagtttccctcctagaccacaaggaggactgaggaaggttggatttagtggcccttaccgacgcattctcgtaaaacctgcaccttgcctgtcctcctagaccacaaagaggactgagaaaaatcagatttaatgacccttactgacgcattcttgaaaacctgttaagagtcctaagcgttctcctgttagtattgggactttacttgtgtcctataaagatgttatgcccccaaaatgaagtggagggccataccctgagggagagaagggatctccagggttggaagagtgatgccttttgtcctcacttatatgaataggaaggatacaatttctgaggctccccatatcctagcttcaggaatagcttttgttaggcctgcttgtctgagtaggggtgctaaaattccagatagtaccccctatgacagggctttgggcaaaaattatgtctttctgattggcgggcccgggtgcctaaagaagggaacagagtcctgaaactagaaaagaactagagacagggagtggtttttagaagcaggactagcctcagagaagagaggtgagaggacgtttgtctgacaggcattaggacccaggaggcaagggtcaggatggataggatagatgggcgagtctcacttgggcgacataactttgagagttccgctcatggccacagggtcaaccagcttgttgttgggaccccggagttgaatggctttcctctctgttgaccgttggctcagcctggaagtacaggagaagtggaagctggtaccaggcaaaccaccgctcccaactctgaagagtcgggggttgttagccctttcccagaaagcctgacacgcgtgtctttagtccggtggctgtgctagttgcttttaactggccgacaggtgcctggtatttagcccccgaattctacggaaaaataggacagaatagcaagcaaaaggggtccgatgatactcactgcttggcgatagtcccatctgggtcgccaaaatgtgtccagaattggttccttctggtgggttcttggtctcgctgacttcaagaatgaagccgtggacactcgcggtgagtgttacagttcttaaagatggtgtgtccggagtttgttccttcagatgtgtccattccttcagatgtgtccagagtttcttccttccggtgggtttgtggtctcgctgacttcaggagtgaagctacagaccttcgcagtgggtgttacagctcttaaaggtggtgtgtccggagttttttgttcctcctggtgggttcgtggtcttgctgacttcaggaacgaagctgcagacccttgcggtgagtgttacagctcataaaggtagtgtggacccaaagagtgagcagcagcaagatttattgtgaagagcaaaagaacaaagcttccacagtgtggaaggggacctgagtgggttgctgctgctggcttgggtggccagcttttattcccttatttggccctgcccacgtcctgctgattggtccatttttacagagtgctgattggtgcatttacaaacctttagctagacacagagctctgattggtgcatttttacagagtgctgattggtgtgtttacaaacctttagctggacacggagtgctgattggttcgtttttacagagtgctgataggtgcgtttacaaacctttagctagacacatagtgctgatgggtgtgtttacaatcctttagctagacagaaaagttctgcaggtccccacccgacccagaagcccagctggcttcacctctcaatatctcattggtcagagaaagtcatgtggccaggcctgcccctgcctgtaggaagctgatgggcatcactgggctggatgtagactcctcctcgaagggcagggggagtgaatgaaagcagccatactgtctgctgcagtgagcctgggttagagaggcagaggaagttggaacatagtgtactgaatgtgaaaatttaagtttgggtcaatatcagctcttagaacttttgtctgctgaagcctttttattttagaataatactctttttgattgaagctgtcctggaaaccactgtggatatttctgctagtagtcgtcctctggtcagaggttttcatatttgggagcacaggtgactataagctccctgatgttgcctgtgcatacttgtaaggttaccctaagggccttagcctgccagatgcttgctggtgaccagccgagccccatcttcctcatgtccaaatgagtcctccttttgtcaggtgttagttcaggaggtaaacttaataataaatgtggctgctttggtgtaaccataaaatgaggaatatgctaaaatagaattcctttggaggcatggcaaaaattaaggctggaagttgagtctgggccagattgtagagcctttgatgactggttccagcatctttggcttcagtttcttctgtggggttaggagttggagtgctgggtgcccaggaacaatcagcctgggcctagagactggacagcagtggggaacgggcaccagacagtgacctcctgatatgcctgttacagatggtggccttaggtccacatttgcatgggctcacccctcttccttttttctgctccaaagtctgtgcctccattgggagcacatacagttgtcacccactctgtgaagccctttctgactcatgttacgggtacttgctttctgccgccgtggactactcggtgactcctcctcctcttcctcaacacctagggcgacttttccctaccatctttctgtgtctgtggacatcacctctctcggcccctagatgggaggggtccttaccagccttgggctgcggcctctctggggagagcccagtgccctccctgctgcatccttcattttcctcccggtcatctccaagccgagcctcctttctctggaaccaagtgtgggagatgcagttgtggtacaaaggaatgaatgcccacttgccttaactcatttttttttctcttattgtcctgtagccagctgctgaattcctcaccactcaccttcacctttctctcgttttctgttcagccagctctcttgaccctggtgcttccttgctcgaaatcatgtctttttttttttttgacaatacactgtgtcagaggaatccttgagttttacaactggaagtgactttagaggttagctgattcagcttctctcccttcccaggtgaggaacgggacacccacagctgtgtggagacttatccaccctgcaggtgccagctaaatccttcaaaatgacctttccaaaattaacgccatgttctgacatagccaaaactgtaatgtctgtcatacatgacaaggttagtattgatgtctcaacaccatctgatacgtagtctgtatttacatttccccaggtgttcccaagtacactttgtagatggtttatccaaaacggtccagtgcagggccccttctggcatctggaatctcttgatccagagcagtcttgttttccatggcccagaattgtggacagacttaatgtctggcttttgtaggtgcccagaagctgcttgttcagtgaagacatggtaaagacaatggggatgagatactgaagacatttttttcttctttggctcgggggggatttccctcagtcttaaatattaatgaagttcggccttcaattaaaaaaccatgcccttggtcgtcctccatgccattgtcttctgaacctaggacttgatccccaggcttgttggctccttccagtctctccccagtgtttgtccaaatccccatcgtcccccttgttcctgtggctgaggttctccgacctacgattgcagaaatcttcctcagatagtttctctgcgtctcactattttcttctatggtttgtatagtttagcaccttctagccattctattttatgcccaaatcgctttatatatggcctgtgtatttcacagagggcaagataattttcctaaacagtgccagctacaattcagcttcctaagaagcaatttctggaaagcactgcaagagaaacgaggtccagtaaacatactctatgagaatagagttgagaaagtcattgtactttggggcttcattttatctctaaatgagagggctgacctgtaagtcatgtagatgattcttctctctgttcagtgggctttttcttgtggttattttgcatttttaaaagtaagagttttccttggcagaatggagttatctgtaggtctgttttgataagtgagatttggtgtgcccttttctttttgaaagtgtggggcattccagttgctgcttcctgtcctcaagcatgttcccctttccctggtgaggatgagaagtctgaggtctaaggggcccaatgcagggctgtagcaagcaggtggtcagggaggctctgctccgtagtctcagccctcttccttcttccagcaccgccgtgtccttcccacaacgtgccgcattgtgttgtgcggttcagtgttagaccatgggaactcccctccccgccacttttaagaaggtatttttctatccttgtttgaatactctgggcttcttttatccctgatttggtattgtatttgattatgtagtttctattgagagcaaaataccaaaaataagctaaggaattttaatgttagttttctggtggaaaactggtaggatgatttcattttgggagtatcggatcattctattgcacatttaattcacttaaatgtaaaagtaagggtgagtgtttgaaatacgctttttcaaatggatagatcctaaagcgtattatggtgcgaagtgtgtctgtgcagccacccttgtccccagcatggtgcctgtgtggggtagtgcaggtggcaggaagtgtgcctgtgctggcattgaggcttcagctgggcaggattcctaatgaccttccttacctcaccaggagcgcttctcacgcttggctgtgtgttggagtcacttggagagggttggcattttgatttgagtctctggactccagaacactgctggagtatcctgcccttttacagccccccaggaggtcttaacatgtagctcctgctgagaattgctgctcctgaggctgaggcttccaaaaggaggcctggagacaatggaatatggtttgtacttccttccctcctgctgctccttgccattgccaagagtggaaatactgctaaagcacccagcaagtcatggtggggaatgaatgaatcccgtctaagacacttgttttaataaccctagggaacaatttagtgtgctaaatgtcatggtaattcttacatacacactgatttactttttgcagagagatttctataaaagttttgagacttccctattattcccatagtacaaaatttctctgtactcagatttttctgtttctgttttttgttgaatagatttctattttaggaaatagtctgttatctttctctagagaagcacttcaatcgaaacattttgttggctgagaatgtgcattttccccctctcaggggtaaggatttgcctcatctcattgtctagcttcctgttgagaagtgtggtgtgtgtattcacttaaactctgatgtcatattgaagcccattggtgggcagtttcagccaatcagatgcttcctgggtatccaagtaagaaagatatatagttctggaataacaggaaacttcacatttttcacatcctgttattctgggttttgtgacttgctgccttgccactatgaaggttagtagaaatttatgtatgtatttctttttgtagtatacaaaattgacaaaataaaaaatgacttgaattttcagagcactaagattagatctgtagagctgaaagacattcagatctcctatttaaaaatgttatgatgaagagaaattttatgttttgcatataaggaagctgaggcctatttaattccttttaaaaaatgcagcttaacccgtatttgttataggtggttatgtcagcctagatgctgctctcatttgagttgggatttcttcttaaataataaatattacaacaaatgtattctgtatgaaagatgattctaaagactatctgttctaaggactgttttttaaaggaaggatttagcttcatgaaatcagttatattttgtgccttttgttagaaatggcatcggtaagcacatagaatgcttagatgtgttcacagctttccttttacgttttgtggttccatctgatatttccttgtgaactttaagaaagtgacctctggttttcagctcctttcttgactcttttagtgatttggtgggtttttctcttgaggtagtttttcaaagtctggttcttctttatttatgtttaaacatctcatgactatttttacttatttggaaaattatagacagaaggcctttagctgcagatgaattttgaataatacagcaggactttttcacatttggtgtcacttttcttagcttctcttggcgtgagcttcattacagcagcatgcggtgcctgcagggtgggtggctggttggatgctggtgcacgtctccattcggatgccttttcactgtgcaccggcccctgtgctgggtgttgggagatgtacaatctgccactgcagatttttagtctagggaggcctgtagacatccaccatcaaactatcatgacacgtgttctgggggagcctggctggggacctgaccgggtgtggtgggggcagccaggctgtcaaggcagggctgtgtcaggaagcaagatgaataaggattagccaggaaagggaagggaccgaaggcaggaagaggaagaagtggggcttctggcagggtctgctagaggtgtggggagagggcaggactgacaggaggagacgacagccctggagagaaggtggggcccttgtccactgatgcttatttccggtaatctcagttagaacatatggcaacaggatacacgttttggtttttaaatgtatctttctgttattggcacctctgaaagaatttttttcttaatttttctggaacatagttgtggacgatttgactgtttatctttgcttgaggttatttggtgatcagaagccatatgtagtctttgggcagtatctgagatgagagctctgtttgttttgacatggctgtgtgtgtgcacacgcgttctagacactagttgccacatacctaggcaaaccaatgtgctttacctttccaagctccaggatggtggtgggaagtgcctgccagtggcaatgtgaccagctccatcgtggtcccagggctctagatagccctggactggaggggatgcggttgtgggcttgcctggttctggcctcagagctctgagggtggtggtctcttgtccctgcccctttcctatctgggatctgcttctcctgtctgtcctccttttaccctcacatccactctgctctctgatgtccgcattttcttttgctgctgttagctttggaatcgactgtcattttcccttattttctgtggctaggaaagaacatctgtagcacgccttgcctggggcctctgtgttaatctaaggagaggaggattgcgcaagcaccgtgcttgcttgctgaatgccagcagcccacccccccaccccgccccgcccccgtgaatgagctcacactccagaggggcaggggcgggtgttgggtagggaattggcctaatgccgaggggggaccctgcacctaagtaggagaattttgattgggttcttacctcaggactgagagactgagcgtgctggtctccctgtcgcaggttgtgcggtctccttaggatttcaggctgagcatcgtcgcgttgctgggagaacttagttcatcctgcacccaacataagactctactaattttgcttgtttaatttttcctttcagacgtttgatgcaaatgatttgtatcaggggcagaattttaacaaggtcctcagttccttagtgactctaaataaagtaacagcaggtaagactcttttttattgaactcgagggggtgggaagacatacgggctgacacctttggttttcttgttttaccaaagccaggggagcattactgaatttaaaaaataagcttttgttgcattacgttttgattgttccttttgctgtgatattttatttgccttgttagaatagaatcttctttaaatgttctggtatatatcaggtgttttcctttctgtgggtggagagatttctcacctgaacgtatagcaggagaaaagtgtctagttcttatgggaaggctcatgggctgtgttggagctagaagcacctttctctcagtttttactgagtgtatgctggttaaaatttgtatctagtgggcagaagttttgagctgtgaccatgataagggagtggctcgtggattggcctgtaaagtccacactacctgtccagggctcctgagggctgtggcacccaggtacatggtgtgtgtggtcctagcccccattagtactgaagtggagaggaggttttggggacatggtgtgcccctctcatgggccacagcgaagacaggagttgttcagacaggtcctctgagggaaggtgcatgttgtccatgatgccaaggtccccggaggaaatgctccatgagccctgaggagctctttcttggatttctgtgtggctcaaaaggaaggaactttttagttgcttttttggtcttattagagtaatttttttttcctatttaccttcacggatgttaaatatcaggtttgtgggggaaagtgccgtgtccttttcaaacagaaacctcctgagttgattttgtcggggtcgcttctcagcttcgtctggcccttcagaggggggggtgtacttgcctcactgcacattgaggagagacgggggttatgcatgctttggggctgcagttcctggctcccggaggcttcatcggtggtgcagggactgtccttggtgctgcctcccagcgcatgtgtgctctgactgctgtctggaagctgatgctgctgctgctgatgctgatgccccggcgagaggcactggcccccatccctgggagcaggggcagaccccaggcagaggtgtggctgtggctgcgtgttcacagcttgacttctgaggtttaaaggactgttcagatgaaagcatcgaggaaacaaaaatttaaatggcaggattatgaagatggatgtaactaatgaaaattgtcacattatttaatgccttctctgtctctacaatctaaaaatgatccttttaatatgaacaaacaataagaaaatcacagccgggtgtggtggctcatgcctgtaatcccagcactttgggaggccgaggcgggcggatcacgaggtcaggagatcgagaccatcctggctaacacggtgaaaccccgtctcaactaaaaatacaaaaaaattagccaggcgtggtggcgggcacctgtagtcccagctactcgggaggctgaggcaggagaatggcgtgaacccgggaggcggagcttgcagtgagccgagatcgcgccactgcactccagcctgggcgacagagcgagactccatctaaaaaaaaaaaaaaagaaaaagaaaaaaaaagaaaatcacttatctaaagttatggatgacattgaaaaggacatacatttagagtggatcactggaatttaatacaagaaatactgcaacaggtgatgtacagaagtggcatattcatgtgtcctgaccacatgggggaatctgcctgcaaactcatattcatccatgcctcagagttttgaattattttttatggaggcagggtcttgctctgtcgtccacgctggaacacagtggtgtgatctcagctcactgaagcctcagcctcctgggctcaggcagtcctcccacctcggcctcctcagcagctgggtctgcaggtgtgtgcctctgtgcctggctaatttttgcatatttgtagagatggggtttcgctgtgctgcccaggcttgtcttaaactcctgagctcaagctatctgcctgccttggcctcccgaagtgctgagattacaggcttatgccaccatgcctgtcctaaatgatgtgccttataattaacgtagatctctgtggcagatggggcaatagcacagatatgtaaaatctacaagtaatccttaatttgactctgctcccattgaatacttttttagaggttgctcacaggagcagaagatagtaactttgaatttcattgtagatgttttctctgcttttgctgtaagtgggggtgctaattaggacgaagtggctttagaacatggctttaatttgtacactcagtcttgggattgtcaaccatctaggtttgagacggtaggatttacaagtaaataagagaagtcagaatccagtagctctcaggctattagtttttacctctaccttatggaaatgtattttgtatatgttcttggtatcattggctatgtgttggatgtaaaatagatagctttgttctttacaaagacaaatttggaagttaccacataaacttggtacttttaagcttttaaactataggaatgacccctcctagatggaaggaatgctttgcttttctgtttgccctttgtttttgtttttgaagtcagtgggaaggcaatacccgtacgttttctttttgagacagagtttcgttcttgttgcccaggctggagtgcaatggcatgatcttggctcaccgcaacctccgcctcctggattcaagcgattctcctgcctcggcctcccgagtagctgggattacagacacgtggcaccacacccggctaattttgtatttttagtagaggcggggtttctccatgttggtcaggctggtctggaactcccagcctcaggtgatccaccagcctctgcctccctaagtgttaggattacaggcatgagccactgcgcctggcctcgtttctttctagatttcagctttccttgattggcaaacagtaagacaactgcagcagccacagttactgtggacattcttgggaaaattgtcattgtctttctgcttctgtctcttaaaatcatatgtgttctcaaggcatttagttgactgtaactggccttttaattggatagaagaaagcttggtgatggggaagtacagaatgtcttcaggatggccctccttgtatgagaatttcctggaaggctgtggccagcagagcactgcagaccatggccgggagccctgtagaatttgctggaaatgcccttttagctggttttgtgctgcgggttgcctgagacccctgtgttctcaagcagaatgtgctctatagagattactcgtaacctgccctcagcaggtcctgggaagtgtagggtgagggggtgacctgagaagaatttaagatcgttggagtagcaagcccccatctgtggggtcaggcaggtggcgtgaagggaggagctggatggaagggcatgggtgctgggtcctctcaggacagcccctgcccagctctgagccagctttacctgatgggatatagacctggtgtggccacatcctaaatgtgtcaagagcagtggggaatctgggtttttggtgataccttcagacttttcgatgttgaccgtttaattcagaattttataagatacgtgcaagccaatccaaacacctgggaggaagctgggacctggagacttagggttgctttcatggaagcctccctggagtttaggacatggccgggcacgtgcctctcagaacagcgattttcccagcaaagtttttcacagcctcattctctcttttttttaattgagtcacttttaagaataaattgctattatttatttgttggatggcctgtgtggagtgtcttatgaagggagatccagagaacagaactaagcctcttactgtctgtttactttgattctgtcagcaacttcatgaggtgagtagagcctgtgctgccttagtgttggggaaataatcctcacaaggttctctctggctgaaaaatacactggattttctcttttaaataagagtcttttccttctgttgcttattgcatgacacatcgtcctggaaaagtgggcatgtggtggtgatgctttggagaatcagtacttggttgttctccgctccataatcaaatttgagaggcttttttttccaggtgaagggaaaatctttaaaagttataatacatttcacaaacttttgaaaattatattagagaagaactgattaatagttatctccagataatttctggaaaggtagttggggaatgaatgcaagtcatttatgtagcaaataatttgttctttgttttctgcataaatgggctgctttgttgtggtcttttggtgtgtccctctgtgctgccctagttttaaagtctagtgtgtagtgtgggtgcgtggtatcaggcgctctcagctctctttttctgtgtgcatgctctttgcagacatcgggctggggagtgactccgtgtgtgcccggccctcgtctcaccgcataaagtcttttgactcccttggatcacagtctttgcacactcggacttcaaaactgttccagggccagtatcggagtttggtaagtttgagagattttgttacttaaatatgtttgggaaggatatgagtgtgtatggatatatctgagaagatacgtatgcctccattaatggtgttaaacagggcaaaggtagctggacttcgcctccgttgtgcctgtaatctggtttggcatttgctcattaccagatgatccagatattatgcttaatgattgcttttgagaaactcatttgtttttaggttgtattgcaagactcatgactcgatatctggagtgatgctgctttaaaaaaacacaccccttgtcatttgcatggcattatcagctatgcacatgtacagaaatattgagaataagaaatatgtatggaaaagtactcagctccgtaaagaagagatggttaaaactaaagaatctggcctttcttctcttcatgaaagcatggcttagtgtgctttactaagtcaggatttagtttacaggggagggaatcccttagaatgactgattgggacgcagagaaagaaacttagatgatcgaacagttgtcgtggagagtgaaaaaatactcgtttaaaaatgctcaggatacaggctgtgagtaaagcccatggaatgtaatagtgaagttgaaaatgagaaactcaagcagggttaaacagggctgcctgtagagtgttggggcagagccagggctgccactctgcagtcctgcacccttctctgagctgcagctggcgggcagtgacttcgattggctgctggggataccactgctttctcgcgacagtacatactttgttagaaacatagtgatcttgtaacgtgagtctagagagaaccctattctagagtcatgaagggtccatggattttcctctgccttaacatgggggagtattgctaagtaagctgatggtggtcctcaagaaataaaagttaatttagatagagtcgtgatttgtagagggaaataaattacagtggtttatgaagcatgtgtgaaaaatggaaagatatgcgaggaatgtgatttttatgtttctgaactttttgaactcaagctcgctatcattgctgtgtctcctcttagaggatccccgaggggtctgactgcttcaggcgtggtgggcggtgggctgcatggcctgagtgctgcagtcctcacagcagccccgagaggcctggctgttgctgtttcctgctttgcaggagcctgttctggaagaattctgtggactaccattgggagcattaggattccaagttaaagaggactaaacaaaccactttaaacacacttgaaatgagctctgtaaaacacatgaggaaaacataagagaaatcagctcgccttgggtaaagctgtgatttgctgtctcacccgttcactggtggcaattttcatctgatttttttttctttttgagtagaggactagattacaaatgtataattttaagtaaaataaagttaaatgtaatgtttgttggtaatgttactgagatcatagtaagtattggattaatttttcattagctgctgaaatttcgttatactagaaatagacttgcgctctctgacctgtgtgaagtctttttgggctgatgttttgattgggtgctagagagctgctttctctttgatggaatgtgcaagacctctctcagccatgctaggtaagaatgaatgtttctttacccttaggtttttctgtgtagtttatcgatagcactttgtagtagttttcttggattaaaaattaagaacttatcttgaaacaagaatggcctaacattcctttgaagctgggcagtggatgcatggagggccacctgtcactctctccttttgtgtgcatttgaacatttccatgataaaaagttaagctaaaaggcaacttgcagtttcttgaatgtcagttttgagatcatattaaacctaagctttgagattgcgtaagacgcttccatcccccaggcgaggatctgtgttctgaggggctggtgttgtttatgcccctttgctcttgtgttgctccttcattacctgcctccctttcagtgtaagaatgtgtcctccagccaccactgcagttgctggttgtttttataagcttgtttttcatctgtgaaaccgtcagccccctgcctcgggacagatttcctgtcttgggatataggcaggcttgaacagtttgatgttgcgtttactgctttgcactgcagtggaggttttcacttgtctgcggtgcccctccaccattccaaggaaagaacagtcaggggagagttcttacccacttccagaggctgaactaaatcgagctctttatccagttcggctctgtgatgggcctcggtggtgaagaatgtggtaggcgccagttgtagatttaggtatggtttttctcatagataaggcatgagttcatacttcactctttgttcgacaccgctggaattcctggtgactgctgtgcttttagtcttcaactgctggctgctgattggtacagccttgagtgctgaatgctgttctcagagtttggggatggcgtttgtgaggtgattgtccccatcatccttcatttctgggagaggtgacttgatttcttaaagtgctgcttctgcttctggaaaccagggacctgtacgtctggcacagtcctgatgctggcagctaaccttggctttggaccagtcaccgagtgtatttccaagacatgcaagaaattatatccaaatgtattgtacacattgttaaatattttcatataccatattttgtcaattcaaagacttctctttttaagtcattttaacacatctggaagtacgtgtatcttacagttgatggtatgccataatgtaattgacagtatttggtggaatataaaggcattgtctaatttttggcatcttatattggttgacatgaggaaactgaagcttagagaagatatttacccaagatcacagcactcagaaatagtaaagttggagtaaaaattgtgtctccgtcctttggcaagcatttctccttctgtaaaggaaattataggtgctcttagagagcggaggagagggtattgttggtgtgaagcagcactccagagtgtcctggttttggattgttagggtaatttcagaacatgggatacaataaagtaatcaggtgattaatatccaagatactgatgggtggtgctttggctccaggcatcagaaagaggccgttaaggagcatggtgggcatagatgactgtgcccggccaggtcgtgtgtgcctggatggggtctcttctccctttgggttagggcagtgggggaactgtcttcactcccctccagttactaaattttattgacacgtaacgtacatagaaaaccagttcatgtattgtgtgcatacagcgtgatgtattgcatgatgaagttttatacatggaacattcccgtgtaagcacccagatgaggaggcagagcatgaccagcctccaactcctcgatggagcttgcgttccccaaggtatctgctgtcctgatgtctgatggtgaagatgagttttatccatttttgtattttttttagcaatgggattctgtggcatatccttttgttgttgttgttgtaacgactggcttgtttttctcaactgaatgatttagattcccttagagtgtcatgttgagtccagacaggtaacaagctacagtttcaggagagctttttaaaaaagggaaaaaaaccccacaatgataaaatagtgatgaaatccatctcttccagcttcctgtaacactactgacagtgaacggacccctcactcagctgccgtgattttaggctgaacgtggtagtatagagtgtgtagttggaatatagccttttctaggacacccttttccagccagtcccatgcatcttgcgctctgatggagcacttcttggcatgttctaagtaacctgtcttgagagtaataggcagaaagaacattacagagcccacatgtccttcagtgtaatgactgctgaagaatggaggtatgttgcgacgtttcacctggatacctggatctgaaacagctgcctgccccctgtacccttccttggattccccgctctcttagacgccgccctttctttctggggtgttgcattgatgaagtaatgtcagtaggcgtgcctccctcacccgtaccttaagtgtagagcgtgcatgcatttgcacactcaagactgaggtggaactccgctgcctcttgatcatacctcatctcccctctgcttccattcaggcctgccctggcctcagccctggtgctggctggagcctcagggctggccaagggtgatctcgggcacctgacctgggaaggggcctgctgcgcctgcgttgctttgctcaccacagctgtgttctggcattggagctgatcaccagggtgcatgcactgtgagcctgttttccacaaggccggcgtgcccaggtgacgttggattacttacaggagagcatggtcgcgatcacagcagacagctagtgagtggagatggtggtttgcaaaaagagaacttgacatagcacagtgaactcgggtcacgtttcaccacacaagagcaaggaacacgtgacagtttctggatgggatcttcagttgcaatggcaaacttgaccctgccccttgttggtcacagggcccagagagctttgtgtctgcgctggtaattgttcgctggcgcttttgttgccaaacactgaagagaggcttcttgattaaatatgaaatatgcattaagtatttcacttatgaatttgaattactaaatacatatttataattaatacttaatctgtaaacacatttaaatagataagtattaaatatttttggaataatattacagctactccttattgaggatctgttgtgacctctttgctttgatgctttaccttttaaaaatgttttttttttcagtgatttatacattcacttaaagtcaggtgattcgctgagacctgctattaggaaaaaacagtagggacggccacttttaatttttttccactagttctttttttgttttgatttttatggtgcatagttcatctatatttatggggtacacgagctgtcttgatacagacatacaatgcgtcataatcatatcagagtaactgggggcatccgtcccctctagcatccatgacttctgagtgctggttcttaaggagtgctttctaatgcggatagttgttaagtttggtgtcctgcggggctgagggggcgatcttgctggaggattgtatttggctgtcctgctcctccgttggtgctttgtaggtatttgcctgtgtgtctctaaataaagtgccctttttttttgtttttccttaatttggggtgatatcaatgtggactcccacagagaaagaggggctggtgctgttttcctcccctggccccttgacctgcataaatgcctaggcctgtcgtccccatggctgagttccaccctggtttcactgagatcggtgttcagggtaacatgacgaggcgaataatatttggagcagagccacgttgtatgctatgactgttcttacctttctaatattttgttttcgagaattagtaattctcgtttctttgtttagttttctgtgtatgttttgcaggttgcagatctagtcttttgcgtatttctaagggtctctttgacattcaaacacattaatttttctcttctcttcccgattaactaagctcttggagcctgtgccctacttgaatctctcttggttgtgagccaggctggccgcacagctgctgcctctgagccgccttccattgtcacctgggacactccccctgactgtgtagatctcctctgcctctttcttttcagtttttttgttaattcccctgttttggagaagcacatttttaactccttcagaaagtggtgcgtgggaggtaaatttttgagatcttgtatatctgcaggtgtctgttttattaataacttttttgtctttagttttcagaagtttaatttatggtatgaattggtttgaatttctttaggtttatactagttggggttcacgcaggttcctggattggtatatttatgtcttctgtcaaatttgggatattctgagccatattttcttaccctgcttttcagctctgccctcttagactcagcttctgagactgataccagtgtttgaagttcttttatttcccacaagtccctgggactgagtgttgctggatgggggggtgatgattggcctgctagtggtagagcgggggctgtatgtcaagaagtgtgggtggtctcaggccttccctgtggctgggtggagggcagggagaagccagtgtgggcagatggaatcacctgctgccacctggtggggatagaggcctggactctgctgatgtcactggtggggatagaggcctggactctgctgatgtcgctggtggggatagaggcctggactctgctgatgtcgctggtggggatagaggcctggactctgctgatgtcgctggtggggatagaggcctggactctgctgatgttgctggtggggatagaggcctggactctgctgatgtcgctggtgttccctagagctctgaacgttctgtgcagtctgtgggacactgcgttgcaggtgggctgggctcgcttaccatcagtggtagggaagaggggtgggccggggctgaggtctgccaggcggcccttttcttgctcctgtgccggcacgagcaggcttctcctagggttgtcaggctgtgcgctttggtagttctgcatctccagcctccagagctctgtccggggcagatggaaatcaaacaggccccagcccctctgccttcctctttctgcctttcagaaatctgaaaatatgcacagtttctgagaaaaatgcgaattaaaatacgaggtactgtttcttgtcagtttggcaatattgagtgttggtggaagtttgaaatgagcacttttagatactgttgctggggatgttgcttggtgtagtttgtagaaactttttggaggacaatttagaaagatgtattaaaaagttaactgtaataaatatgtcttctgaccagaatttaatgtatagctggtttacaggtatattcaaagatagacatacaaatatttttaatgcagccttgtctacacaaggaaagtactgtatatggtatctggaaatatactggaaataatctaaaaatccactaatggagagtgggttccataatgagtggtatagtcatatagcataacattaagtgttatgtaagcaccagtaagtactgccagataaatgacatgttgtcttaacttttgtgacttgtggagaagtgcgtgtagtgtgactctgtctctgtcacatggatgtgtctgattaggcatcacagtggcagaccaggacctttgaatgctgtgaagagggtgtcctctggggctggagtggtgctggtggtggtcatggggcactggaagggaggaaactgaaatttctctaaatgtatttctactgttgggcaattatgctacctttgtactagtaaagtataatccattttataatgaagtagactgttcttggtataatttttctcccactcttcttccccttttaggacatgaccgataatagcaacaatcaactggtagtaagagcaaagtttaacttccagcagaccaatgaggacgagctttccttctcaaaaggagacgtcatccatgtcacccgtgtggaagagggaggctggtgggagggcacactcaacggccggaccggctggttccccagcaactacgtgcgcgaggtcaaggccagcggtaagtggccgagcctgggctgtgtgtggctttttgcgatgagcagaaagaagtaaatgtacttgacatagtgtttactctccagctggacctgtgcaaatgacctggtcttaggatacagttttttgttagatgtaatggattttcacctcagccccacattggggccctggcatcaagggctctctagttactagccagcatttcctttcatcctggcattttccagacgtgaagagaaacatctcgaatctttatcattgcagttttactgtgaaagaattgatctttttttttttttttaagagctagtgtcaggacttggagttggcagtccgcaggctgtgtttaatttttgtgactatgggtggtacttttggcagtggtgtgcaatgaagtaatttctgtcattctctttgtactagtgatagtattttacaaatgcattgcttccttatgttttgtagttgttcacattgtttcactgactttccgattttgaggcttgtgttcttatgaaagaatagtgatcctcggcacatggctatggctgccgggctgtcgtgcttcttgtggaagcgtgtgggtgggtggacagaggtggggggtgggatttgtgaagggaacaatcatgtgtgtcactttacttgcatcctgccctgtagttgaaaaacaccgttgtatactacagttcctcagattctgctggggaaagagtgacttacagagaatagctgatacacagggagctgtggaaaggacatgatacaaaattgtagctctgctctagggcttgggtgactgagcctcagagccacaggtgtttcatatggaaaatgaggatgatagttctcccttgtgcggtcttgtggggttgaattgttaaggtttatactatgtgtatggagtctggcagagtaggagctcagggaatgttaatggctgctattgtttttctaaggtagcaagaaaaaaagatttacaaatgggaatatgacaattttgatgtaaaaatattttctcagtgacctcagaaaacaagtattttaataaggcagatggcagcccttatttgtaaacttctctggtgttggaatttttaggaacagcacctgcctgttcttattgtatgtatatgtatacatatatgtaaagcagttcgccatttttaccagttctaagtgtactgttcagtagcactaggtacattcacagttttataaccatcaccaccgtttatctccagaactgtttcttctcaaactgaattctgttcccattaaacagtccccattcccctccccagcccctgccctctaccattctgctttctgtctctgaatttgattaccgttggtgcttcgtgtaagtgcagtcattttgtcttttgactgcttatttcattcagcataaagtgctggagggttttccatgctgtagcatatgacagagttaccttcctttgtaaggctgaataatatttcatcatatgtatgtacaacattgtgtgttgatgggaacttgggttactttcacctcttggctatgtgaataatgctgctaggagcatggttgtgtaagtatttgagtccttgcttttcagttcttttctgtatatacccagaagtggaattgctgggtcagatggtggttctgtgattaagtctggaggaactgccacgtggttttccccagcggctggaccatgtcgcattcccacaagcagtgcacagggttctgctgcttctgtgttctcgccaacttgtttttttttttcttaaagtaatagccatcctgttggatgtgaagttgctactgttttttgtagttgttaataatgataatttaaaaggcagtattttttattataataaatcgacttgggcagaatttttttccggctgcttgttatgttccagttaatgtataaagtactttccatttgcaacttcagttctcctcataacccttgaagacaagtattgctgggatattaagaagggggtgggttgcaagtacatgacatcctttaaaaaaatccgttcatgtgtagagcccactgagagcgcggcactggcaccatgctgaggcgtggaaatgtcaacttgatagacatcactgttaggagatgcagtttagtctgtgactcagttggatggcactggcctgcatgagccttcctggagacctagggctagggcaggcccggtccatcctgtgagcccatctcctagcccagccccaccagttggagagatctttttcctgggaaccaatgagagcagccctgggccgagaggcctgaggtggcgccagtggactttccaggaggacacttgagccagggcagaggaaggaggacctcgttcgttgctcacctttgccaaggagagttgaggttacagaactgctaagtgggacgcacctttggagtagggacagacgcttgttccagctggtctttctgactttctttaattcttaagtgaactcctcctttaagtgtgaatcctggactgactctgaaccaccacagtaagagtgcaggtgagtggggttttacttttcatgtatttctccttgtggattttttagaagtaacccagagcaaggaaattacgctgaaaagatggggtttgtggatctcaaaatcctctccagttggaagtgattttcagacacatttgaatgtcgtcagtgtcatctgccgtgggaatttgtcttgcagtatgctgttacccctgatagcccacaggaaggcatcgtgagcccccgcttttgagtggactgtgggcccttgagctggcagcagcagaggacgccctccaaaggaccggcagggcgtgtttagaaacatggctctcatgaggaacagtgctctcactttgttctacccgaagccactactcatgtcttaggcgtgtctgagcgtgtgtgcgtgcccggtttcaacgtatgtgcgtgtacatggtgtgttgccatcaaggagctctttgcaggggccacacggaatccataggtgtattagggtgctttagagggacagaactaatagtattctcctgttagttatatatatagatatagatagatatatagatatgaagggaactttattaaggggagtttattatatatacatgttatatatatataaaggggagatatatatatatctacatatacatatatacatatacatccccctattgtgggaccttgtgatcatgtaagttaatacctaataaactccctttcatatatatatagatatatatgtctatatatatctatatagatatatatgtctatatatatctatatagatatatatgtctatatatatctatatagatatatatgtctatatatatctatatagatatatatgtctatatatatctatatagatatatatgtctatatatatctatatatagatatatatgtctatatatatctatatatatgtctatatatatatctatatatatatctatatatatagatgtctatatatctatatatatagatgtctatatatctatatatagatatatatatctatatatatagatatatagacatctatatatatagatatatatagacatatatatatctatatatatagatatatatctatatatatctatatatagatacatatctatatatctatatatatagatacatatctatatatatctatatatagatatatatctcccctttatatgtatatatatatgtatctcccctttatatatatatataacatgtatatataataaactccccttaataaaccccttgatatatctatctgtatctatctatatatacagctaataggagaatattattagttctgtccctctattacttctgtccctctaaagaaccctcatacacctatggattcatatatgtatgtatatgtgtacgtgtacgtatatgtgtatatgtatacaaggtcccacgataggccatctacaggctgaggagcaaggagagccagtccgagtctcaaaactgaagaaattggaggctgatgtttgagggcaagaagcatccagcatgggagaaagatgtaggctgggaggctaggtcagtctcgccttttcacgtttttctgcctgctttatatttgctggaagctgattaggtggtgcccagcagcttaagggtgggtctgcctttcccagttcacggactcaaatgtgaatctcctttagcaacaccctcacagacacacccaggattaatgctttgtgtccttcaatccaatcaagttggcactgagtattaaccatcacaatagggtttgtgccaaactgagacctaagtaactttggaaaatttccctttttttcctgtttattttttaaaattcaagaaatgtcatttttgagcatattagtgatgcatttgctaaactttatctgatggttgaaccaaaggaataaccttctgtccctgttgttctctaattacctaagcatattgtatggaaagtcatgctagttttattttagtttatttatttttaattttattttactattttattttgagatggagtttcactcttgttgcccaggctggagtgcagtgatgctcactgcaacctttgcttcctgggttcaagcgattctcctgccccagcctcccgagtagctgggattataggcacgtgccaccatgcctggctaatttttgtatttttagtagagatagggttttaccatgttggcaggctggtcttgaacttctgacctcaagtgatccacctgcctcagcctcccaaagtgctgggattacaggcgtgagccaccacgcccagcccagtctgagtttaaccgtgggcatttgaggcaagtgtgaaaccacattttttaccgtgttactctagagcagttaagaataaaactctaggatcacaattacattcagtacagcagacttccctctcacctctggctttgcgtaatgtggttacaagtacctgcagtcaactgtggttcgaaacaggtgagaacaatacagtaagatatcttgagagaagagaccacattcacataactttagttatagtatattgttataattgttctatttcattattagttgttgttaatccattattgtacctaatttccagattaaacacacataggtatgtatagatgggaaaacatagtatatatagggttggtatatatacagagatatagctgcagtttcagacatccagtgggcagtcttgtgggtacccccgtggataagggtgggcggctatattgcattttttccagtagtttatgtggctttctgattttggaattaggtttccttttttgaagagtgtgttaaatgtattttgatttatagttaattagtgcttgatttttctgaaaacaaaattgtgccaggttccaaacttagagacttctctgaccatcatgttaggatcatttctttattcatgaaaacactgacttcctttaaattgagggtttctcttctgaattatattttaatttgatgtacaaatagttttactgagtaaacaagaactgaagtttttctctaaatggcacttttttaggctgtttatctccagataaattgaccagatggtccaattcacctctcctgcttccctggggaagtgtagccattggtggtttgccctcttgtggtcggagatggaattgttcttgtcaaggttcaccgttgtgttggtgcttttaacctgtggtgtaggatttcttgtttgaatagtccctctttgaagacagataaaatgttctaggattctgtaataacgatctttctaatgcttgtgtcaaaagcattgtatattattcctgaatatgtacagtacagtcttatggaaggtaaataattgtcacttagcatttattttctgtgcaccttttttggttaggtaaaacccatggatttctatagcattttttttttttttttgagacagagtcttgctctgttgcccaggctggagtgcagtggcataatctcagctcactgcaacctccacctcctgggttcaagcgattctcctaccccagcctcccaagtagctgggattacaggtgcccgccaccacgcccggctaatttgtgtatttttagtagagacagggtttcaccatgtcagccaggctggcctcgaacacctgaccttgtcatctgcccgcctcagcctcccaaagtgctgggattacaggcatgagccaccgcagccagcgtctacagcattttttacaggctgatatgtatttgtgtttcacacccacccacccaccctcactcttactcccttgcttcagaatttcctaaattcaagggagaagttaaggagagaagcagcaaggtccattctggaagtgagtggtgatggtggttgctgtgattggatagaagtggaggcactcagctgcatgtggcacacacggttagcagctgtgagaacacacctcgtgctctgtgtgcttccaagaccagttttctgtgtgtgcatgtggactcaggcttttttagatgattatttctaatgtgctgactttagtcattctcctatttctggacagcttattatctgttgtaaagacatttcttttaaatgctgttttgggggctggttagcttgagatgatgactgtctgtgtttggcagtgatgtgagagcttaaatgggactgtcatttgctgatccacagatctttaacgacattgccactttttaagttggtcacttttaaatattttttacttatttttgacataaagcaacacgcagctgaattttggatgtcgttattaatttagctgtggaggaacagtgtttgatgtgagtataatctgtgcggggaaaaggacaaaagtaccccagaaccttgccttccttcgtgccactggatgtgagcttgtgctgtagtccttcctcctctccggtgaggattgggtttggatgggacacatgaggctgcattacaggatggacctctcagcactattgtttcaagatgtaattgtttttaaacaagagagaagaacataaattagaagatatgggccccccgaggcaggcgtagggagcgtattatagcattatgtacaaaggggtcttggagtagatggtttggaaatgtttctggcgtgtgaaagtgaatattttcctagattggtataccgagcatgtcctcactgcaatgtggctgcctcccgttgtcggtgatgattacacatcttccgtttcaggagcacgtcccatagaccagctgacttagagtaattaggggtcaggttgttagtcttccagtattagagcttctcttttttaaaaaagttttatttgcatttatgcttaagtaattgtattacttacatgccacatgcttgtagcatgtgatagccagtagacggaagagctcatgtggggaagagcacaggccacccactcccacagccctgatccagggagaggcgttactcacctcctctcctctcctacgtagctgcctcgcaactcttcacagtatgcagagacttctctgcttagatttatagggcgtatctcactttattgcactttgcttgtttttttgtttttttttttttctcttacaaatggaaggcttgtggcaacactgttggtgccatttttccagcaccatgtgcccacttgtcccagtgcttcatttgggtaattcttgcacgatttcacagcttttcattattgtatccgttatggtgatctgtgatcagggacctttggtgttactgttagaattgttttggggtgccatgaaccatgcccatgtaagatggcagacttaattgataaatgttgtgtgtattctgactgccctactgaccgggaattccccatgtttttccccaggccactcattccctgagacacaaaaatactgaaattaaaccagtttataaccttactatggcctcttaagtgttcaaatgaaaggaagagttgcatgtctctcactttaaataaaaagctagaaacgattaaccttagtgaggaaggcatgtagaaaggtgagacaggctgaaagctaggcctgttgcaccagtcagtcgtgaatacaaatgaaaagctcttgaaggaaattataagtgctactccagtgaacacatgaatgataagcaatgaaaccaccttattgctgatatggagaaagtttgagtggtgtggatagaagatcaaaccagccacaacatttccttaagggcaaagcctaatctcttcaattctatgaagactgagaggtgaggaagctgcagaaaaagagtttgaagctaatggaggttagtgcatgaggttgaaggaaagaagccgtctccagaacatgatgaaagtgcagggtgaagcagcacgtgctgacggagaagctgcagcaagtcatccagaagatctagctgacatcatcggtgaaggtggccacaccaacaggctgactctctggtctggggttaatgtagctggtgactgagttgaagccaattctcatttaccattctgaaaatcctagtacccttaagaattatgcttaaccaactttgcctctctgcgctgtaagttagaacaacaaagcctggatggtggcacatctgcttgtgtcatggtttgctgaatattttaagcccactttagagacctcccactcaggaaaaaaagattcccttgagcatgttactgcttattgacagtgtacctaatcacccaagagctttgagggagacatacaaagaaattaatgttgttttcatgctgctaacacagcatccatactgcagctcatgggtcaaggattaatttagatttttgggtcttagcatttaaggaatacattttgtaaggccataaatagtggttcctctaatggatctaggcaaagtaatttgaaaaccttctggaaaggatttacccctttagatgctgttaagaacatttgtgatttatgggaggaggttaaaatatcaacatcaacaggagtttggaagacattgattctaaccctgatggatgaccttagggcctcaggacttcagtttaggaaggaactacctgtgtggtgggaacagcaagagaactaaaattggaagtggagcctggagatgtgactgaactgctgcagtctcatgagaaaacttgaatggatgaagagttgctccttatggctgagcaaagaatgtggtttcttgaaatagaatctacccttgctgaagtgccgtgaacattgttgaaataacaaaagatttagactgttgcaaaaagttagttgataaagtggtagcagggtttgagaagattgactcttaattttgtaagaagttgtatgtgtgtaaaatgctaccaaatagcatctcacgctccagagaaatctttcatgaaaggaagaatcagttgatactggcacacttcattgtcttgtttcaagaagtgtccatagccaccgcagccttctgcagccactgatcagtcagcagccatccatatcaaggcaagaccctctacaaagagattacagcttgctgaaggctcagatgattgttagcatttttttagaaactttttttttaactaaggaatgtactttttttaaagacagtgcaattgcaaacttaatagactacagtatagtgtaaacatagcttttatatgcagtaggaaacaaatttgtgtgactcactgtattgccatggtctgaaaccaagccctcagcaacttcagggtctccctgtgtaccccgtttgacttaccttcttcctcctactttcttctaggtttgttctttgtgattaatttgttcttctgttggtttcctctgttggtgtgctaaacgagatgctttagtcttatttgtatttcagtgacatttggcagatacctcctgatgccccattttgttccgtgaagattcaccttgacccttttctctatcctcccacattctgcctttactcacctgtatcttcctgttgcattgtcaaggttgttcacagttacaccagttacacttggctctaaagccacacccagcatccattccccaaatacttactttggtgagcactgttgtggaaactgagaaacacagcagtgggaaaaccaagagtgtcttcccagaagttatgaagcacatctgaggtgtcctgcacggcacatgaggtaagcgtgcaggtctgtgctctctgctctctactggcatccaaaaaagaggagggggcgcttttatagaatgaaagagactttagtggcacagcagccagatgtgctgcgcagacttcatttggttcctgattcaaataagctgacatcagaaagccattgttttgacacacaggaagatctgaatatagactaggcattagatactatttaaaaattattaatatcgtcaggtgtgataatggtctgaggttagggttttgagtttaaagaagaaaagctccctttgctaacactgaagtgttggtgagtggagatgacctcatctctgagacttgctgatggtgcttccagcagagaacacggcgggagcggatgaggcaggctcgatgctgaggactgctaacactgttaagagtctatacgtggtcattctctgtatgtttatgtatatttttaagtttctaaaagtttgggaaaaagtaatggcacaattataacattttcgaacaaagatcgagcgtcttagcagatcatcccttgaacaactcggaggacgtcacctgacaggagggtgcatgtggttcaggaaagcggcaggcagacactgctgagcacgggcagacacacacagacattgactctgtgaactctgagtgcgtgagtaacagccaacaaaccacgcacagagccccagcacagaaggtcggaagaggacgtgggaattccgagtttttcagggccatgtctgctctggtggttgaagccagcggtgatgattaactctggactttgctgggttggtgacacgtcacaaatgaaagcgtaaccactgaaacagagggaagcggctgggtggcttccagtcaagcggaagaggcaagtgaggactcacagaagtgtgttcttctcaaaagaggcagaaattcccagccctgtgatggtggagctgcctcggagtggggagggcattgcacctggctccccggacctggccctcgcccagctgtgcagcgttcctgtgtgtcttggtggactctggttttgctcggggctggctgtgcttcctcagcccaaggaatccagagctcttcagttccagaaaggatcttctcaaggactacttccagctcactccctgatttttctcctgaatatcttactagatgtcttattttgccctctgttttaatccgcgtattttaatctactttgcgtatctgtttgtttcactgtgctgtattatctattcctctgcctgtcagttcattaattccctcctcacggtgatactaacctgtttgtggagatttccattttagtgaccatatttatttgtagaagttttgctgcgcttcagatgttttcagtcttcatggcgccttttttattcgtcgtgattggtcctaattgcgtatctctcctgtcattttaaacgacagattacattaggtcttgattttcctcttatttctactttggggaacctggtccctttatatgccacatccactcacaccctcctggtagctcagtaccttctgtggctgatactgtttaatggtgggcttattcctgatggtgggttcctgtgtaccctgggttgtagaaatatttctacagagaggagtaacatttgcttcttaggggttcccggagacttttttgtcccaggcaggtactggtagtcctgcaagaggagagcataggttggagtggtcctgctaagcaggtgcgggctctgggttttggtttcttctaggctgtgcccccgtctgtgagcagcctgcacacttccttgctatttctctagaccagtgcatagaagcttccagacatctttgcatcagctgtgcgggttactaagggatccagttttatttgcttgggttggagcaggtctgttttcttcctgcgttgggtgtagccccagctgctggagcctggagacaggtgtgtctcccctcccctagtgagagggtttcctctttgcttttggcatgtcatcccctctttttcttttacacgtctatatttaaattttcttgttttcagcatttttcgagtttattttaagaaagggaagacttgctgccccagtcagcccttggaaaggtagcactaagctacattctcttggttccccactcctcaataccagtgaattttattaatttttagctaccagatgggccaaaaaatgctgcttttcttaggatagtagggcagttgagtattttctaatctatttcctggctgtgtgcttttctgtctgttacgaatggccgtaatttagcctcttttaatttcaatgctgttttttggtagaagctactagaaggcttcctaggctgcccgggagttacctgtgcccctgctgccccgcacccctcctgttgatggcacatttcttctggcgtgaccgccccaggagcctggacagtggtggggcaagcaaggagctttgcatcagaagccaggagtggccttgctggggtctggcagccaggggcttcctgtctcccctgcagggtctcctgacagcagacccaccttgggcgtttgtggaaattacgcttcctgattggaagcaagggcacgttgtgggtggcacacttcagcagtgccctcttgttgaaaacgaaccacagggtgttctggggaacgtgatcttgacaccttccattcagcagccagcagaattgggagctcttttttcctaggggagaaaaggcaacctgcctggacttaatctgatttgactgggtttcttctgcctgttttttatttttatgtaatgttagtaacctgaagctttttcttttgaaaacttttttcttacagttcttatagtaaattaattgaattttattaactgtggtgttgagttgtgaggtatgtcttaagtttaaaataacacagctggcaaaatcattacttttaaaataatgcagattcagggtcactgttacgaagttcacttcaccggcacacatgctgacgtgcggcttatgatcgcagtggctgtgattgaggtgtggacagtctcccctgcaatgttgttttctatcctgcctccaaattgtagatttcaaagatgaaaaagtgttgtttttcctcagatgaaaacatttcatagtgttttcttctacaattaaattcttagctgtagaaaagagattgagtaggtaagtgtgctagcaagaatagattggttttcctccttgtagctcttacagtgtagaagggatttgtttcctgtggagttttgttttccatcctgtgggcagagagaattcttgcaacttgcagcggcaccttattttgttgttttcaaccacctggaagtacttaacagtgaggcattgaaggaagatttagaaacttgacagtgaggcattgaaggaaggttgaggtaaacggctccacaggaggaggatccaaagttaaggagcatgaggttggttcggggcattctgggtttctgttgccagaagatggtgcagatcctgaggaggcagttgacgttagggacctgaagccttagagtgtttggggttgaaggcactgttttgggatatactacctcagaccccaggacactgagattgtggatgggggacgcatgggaggagaggagagcagaaggcatggactgtaggcaggtgctgctcacacaccagaggggaggagtgtgttcccgcccagtgagggggttcacatggcaggattcttgcagtggaggtgagctttgagggaaaactggtagggactaagtcctctaggaaatgctcatcagaatttcttggggaagaatgtgggaaaaaacctctccctttcctttgtccccactagccccaatttgatacactgctctgtagccctggaaaaccagtggtaaacagaatccgtagaaccaatgttagatatacagaaccaatgttagatgtacagaacgtagaatcaatgttagacctatctgcccaccccctagaactgttggtagatctaccccatggaactatgatatacacacaaccattgatagacccaccctatagaattgtgatagacacaccctatccatctaaccattaatagaaatacacacatacccataaaaccattgagagacagagggacccaccccatagaaccagtgatggacgccatacactgtctgcagaactaatggtaaagacacagacactgtctgtagaactgataatagacacacaccaccccatagaactatggagagacagacccacccgcacagccagcgatggacacacccacactgtccatagaaccagtgatagagaccccctcccgtagaaccattggtagacaggcccaccccatagagctgatgacgggcatgcatggtgccaggttttgtttggcaggtgtttcttcggcaggtgtttcttcagcacctgttatgcagagtaagtgtgtgttgaatggatgtggagtgaaagcggtgctgttttaaaacatcagaatccttgctggagtcaggactgctttaatggttttgcctggtgtggaagtgaaggcggtgtgggtttttcttgtttttgcccctgcttgagatgacttttctttctcctccttgtctcctgtgagtgatggttatttcaagccctgagccagatcttgcttgtttagagagacttttccattctgagggatctgagtccctaacttttagccctgatgttttaatattgttatgtatctgccaaaatgccttttatttgggtgacgctttatatttaccacactatggaattgtccttgtagctaaactgctttggttttggctggcattcgtggagcagtctcttagacgccttcaacttgaaactgggagaacagggtggggatggggtgctgtgattggccttggtgagccgagcctgagggactgggtttctggggcactgagggtcactgtggatggccttttccttggcttgccatttggcttgttaattcagtgaggctgctggatgagtatccttggcctgtgtgaggggctggaacttttgtcatctttagtactgatcagtaaaactatgttacattttcatttcagagaagcctgtgtctcccaaatcaggaacactgaagagccctcccaaaggatttgatacgactgccataaacaaaagctattacaatgtggtgagtaattgcagaacatttttaaactaactggtttttgactgcctgtaaaactcagcaatgtagaatgtagtgtaaagtacctagaataggaagaaggaaataaagttcattcatctgccacacaaatgtaaccaccattaaggttttggtctgtttccttctaatctctgtatttttgtaattgtatgtttttgttttaatatcatgtatatggaaatgtcccttgctcttgtcccgtaacatagtaatgtgcgtgtttccccatgccatagccagtcttcaaaaatgatatttgaaaaaatgtataatgtgatttgaaaattttatatgcattgagtgccattctgtttgtattcagagtagactgtaagtactttagacataaggcttctaatttattttttctcttaatatagtgtttcccaggattgatgtgtacatatcacatggcgtagaattaggggagcatgtctaaacgctatacgtgttaaagacaggtgtttctggatcctaaaatttgctgcttaatatgttcagtatgtgatactaaatctgtgtagtctaatgctattaaatcaaatgtatagtctcatggtactaaatctgtgtcgtctaaaccttctttgtacctaagcttatgtagcaattgcatgttctatagaaatggaaaataatttattttaaagaatttattaaaattttaaaccactcaacatgataacaacaaagtaaaccctctaaacatgtgtatgttttgaattctggggaaaatgcgcatttgttttgttatttcttcccctactcccaatcttcattttcttcttgagtagatataactatgaacccacgagacctttgaattgttggtgtgaaacagcagttgattggtgtttttgtgcagcagtcattttcttgtgagcatttcattttctgcacctgtgttgggaaacggtgaaaaggtgtggtgcaatggagtctgagcagctccaccacgtggagctgtgccaccgtcttgtgctgcggggcttgcactctcagcttcctcctgagtgcccaccttccatctgccccagcatcgtactgcaggacagactggcctggggacccactcattaataactgtttattgggcgcctgctctgtgcagctctgttaaaggcaccaggatgcacagtgaacagaatggcgggtgcctctcccctcgctgagctcgcacttgggtacgggaacacaatggtcttttgttgcctccatttttactgcttctttttcataatttgacatctgtgcaccttcttgtgagcaggtctcctcatgcatcatgccacttctcttacattagtggcaatctttgacttatttttccttgtatttggtcaactccggatccttttctgccttggaaacccttttcttttgcttcccctctttcttccctttttttcattcatcttcatttggctgcttggactctgccttccatctcaactttgtggactttgagaagatcagactccttttagcgcgtcgtgtggcccacattacccgagacacctgctttctgtcatctctcctagtgctctgcatcgccttcatcccttggcctgttgggcatttactcccaggatttggctctactaacccattcgctttttagtgtgtaatgtagcttatgtgtagttttgtgtacgtagctacagagacagtagatgggttttatgggttgtaggaaaacttgagttttaactcctggagctgccctttcctcttgcattcttgtataagacactgcttttttggggaaggcttcatgtggtgaataacacagccacaatccacagtgagattccaaagggtgtgttaccttctgttatggttcaggtccagataattctgttagaaaaagtggtcagcagtgtttaaattggtgccaagggcattctttagtttctccattaatcttgctttcattaggcactttataaaaccaggcaaccatgcttttttagaaatcctggtgggtttttctttgcattatatattctgtaatacttctcagattgaagcatagtcgatacctttttcgttttccttctctaactgtccttttacagagagaatagcctgggtattataagtgctcttttcttcaaatcagccaactctttcatacagaatgatggaaaacaccttgacctcaaaatcacatctaaattgttttctatataaagctgcatttataaatagcacatggtaaaattacagttgttatagaaataaactcatagaattcatagagaattgtcttttgatgtagtactctcattttacagcagagaaaacagaagctaaatgccttgtccaaggttatacactggttactaagccaggaatcaatttcagctttccttaattttatatttgtaaattgtacataaaaatagagaacagaatacaacacagaacaaaacatgatagataatgtgttaggcatttctacacccccttttgtagtttcgttttcacagaaaactataaggtctgggtgtttttaacctcactgaaagttgaaaacttactaaagggtaagactggtgtggaccaatggtgttaaggaaatttacatgaatgacttgtcttaacttgggatcagtataatggagttgagagaagagtattccatgcgaaagtaccaacattttgaaattaagagacaatgagacaggtatgaatgggatggatatgtgttttcctgctattgtataatagttaagatgaacaccaaaaagacactggaaagtaaaactcgtagtaatttatgtctgttattatgaaccattcagtaactatttctctctcctctccttctgggactcctgtggtgcaattagtcaaatatagacaatatttgagccattgtcttcatactgtcctttaattttttaaacatagtttcctttagttctttggacatatttataacagctgctttgaaacctttatctcctaagtccactatctgtgccccctagagacagtttccattgactgcttctttttttcttgtgtgcgtgtgtgtgtggtcacactttcttgcatgtcctatgattttttaaattgaaaactggatatcttagacctattttagcagctctggatgcttgaaatccacctcccctgggttatactgttgctgttgctgtgtcttgctcagtgactcacctagagcacttctgtagtttatcttcccatagtcactgatgtctatttttatttttttattcttgtttttatttttaattctgtctttctaggattcacttttgggtagcataatttagtattcagccaaagattcaccaaagattgtgcttaaacacctttaacagttcaggtattacggctcacacctgtaatcccaacactttgggaggcctagtagggaggattgcttgaggctaggagtttgacaccagcctgggcagcataacaagaccatgtctctagaaaaaaccaaaattacctgggctgggtggcaaatgcctgtagtcttagctactcgggaggctgaggtgggaggattgcttgagccctggagtttgaggctgcagtaagctatgattgcaccactgcacttccagcctgagctacagaacaagattgtgtccctaaaaaaccaaaaaacacctctgacggtgaggtttcactcttgccagtgatctgtatggggttggggaatgcattcaaagagagggctggggaggagcatgactttttaaaagttaaaggcagtggatgaaatgacaaaggaaaagataaatcttttaggctacctaatgagagtttaatatattccttgcctcaaacagtataagccagatcacaagttaattggaatgttatttgcatcaggtataatacaaggttatccttaatgtctgaagagctcattaagacaaatacatgaagattaatagacaaatgggaaaggttgtgaacaatttaaaaaatggtaaacactaaggctttgaaaaaaaatagttaaactcaccataaaaattttaataggcatattttctgtaatcagtgagcagagatttaaagagagaatctttagttctaatggtggaaatgtaaatccatacagagtttctcaaaagtaatatggcagttatatatagaattctggaagtgatcaagttctttaatttagggctttctctttaatttctaaatttcttgaaatccattccagagaattaacctgaaatatattcaaagatgcttgtgtaaaggcattttcagaggattatttgttatagtaataaattgcaagcaacccaaaataaacagtatgagatgaacagtaccagaatgattaagcgatcagtggtttgtccatttgtagttactaaagtgtacatgaggctttaaaaatacaaaaaacatatattttcatgttaagtgcaataacagaatatgaaattacacaggtgatatgatctcatggtattacaaagttgacatagaagatagaagacattgtgctagagaatggtttctttccagtggaggaattttagcttcccactaatgtaagggatagtgattatgggggaagtctttggcaccacagtccagaatgtgttggagatagaaacgggcctctgaggctagggaggaagccagcgtggaacatggcaggcacacaggccttgggcttggagagtgacggggaagggagaggaaatcaagatctcttaaatgcagatcttttaatttcaattagtttttgtgacacagccagccactactcttgcctctattttctcatgtacgtactgtttgaaatcagtctgttagctgtgcttagggtgcccttgttgtgtaggtagttcagataattaagatccgggcggcttgatgcagtggaaggtgtacagcctttttgttgaatcgtccatgctgcttagcctgggtggccaggagctttggccctagcttcctgagcccagttatctcatttgtaaaatgagattggtaatgctggccctgacctggtagtattaagtggactggcaactggccttaaggcctccagcaaagtgctggaccttagaggtttttgtgtgtattaagaagagtatttaagagcattgggaacagaaggcatcactgaggccaccataccattctgtttgtaaactggaatccccgtagattttgagggtgacctgtgaaagctgtagccaaggtggcctgatcatataattaaaagagacaggtttgtgacctgatgtgcccgagcttggtggatttgacagtgaaagcacactcgttgcccccatggcatggtgactggcatctttcctgatggggatcaaaggaaggggttggatgcctaggctggagagaatgatggtctggagttgcctctcggggggatgaggagcaccccgctccgtcattagagaatgaggtttcttaagtcgctgactgggaagacacagtccttatggccttccctgctcagcgatatacactatggtttgattttttaggctttctgtattagtccgttctcacgctgctgtgaagaaatacccgagactgggcaatttataaagaaaagaggtttaattgactcagagttccgcatggctggggaggcttcaggaaacttacagtcatggcggaaggcacctcttcacgaagcagtgggagagagaatgagtgccaacaggggaaatgccagatgcttataaaaccatcagatcttgtgagaactcaccatgagaacagcataggggaacgcgctgcgtgcccctgctcccccacacccccgtgccatgattcagttacctccaccctgtcccgcccttgacacatggggattattacaattcagggtgagatttgggtgggccatagagccaaaccatatcactttccctgttatttagagcattattataatactgtgaatataatgtaataggtagcatcactctttctaatctgtaagtgtataaaacggttatgtatccttagatgccatcacacacatccacgggcctttcctgtgctccagagaagccgcacacctgtcttttcctccctgctcctttagtttgcgatggccttcagatgccaggccaaggaggaaaacctgagcctcctggtgacagggtgtcttcggtctccatccatcagcagtgaccctaaaccctggcgttgcttcgtctcttcatcttctgctttgcccttggcttttctccacctcaatgaagatttctgttaaatcttttgactcctgaagtctctgcttggggcccgtaggtggagatggttaatgatgaggggccctgaggtatcagggagggtgtgcagcttgtgggatcccctcttttcctgggcggcgaggtgcctgctggcttctttcacacctggctcccattgtttttcatgggatttccttgctgtatctggactaagatgatacagatgaaggttgtcaggtaggcactagtggaatgctgacacggagaggagctcagtgtttgggaggattgagtgacttaattgcaagaaaggctgtcttgtgaaataattacctcctgactgaaggagtcatttaagaagcagctccaagtaagactctacattgggctggaaggtcgaagggtgactggctagatgccttcctactataagccaatgactggcactcttgagtaaccattataacctcgtaaaacccctttttgtgaaaaagggaaacagaccgatagacttgtccagctgcagacagtcagtggtggagcgcagctgggagcccaggtccacgtggctgcagaggccggctctacctgtcgccatgctgctgtgcaggtgccattggtggtgtctgcttccccctgtgtgctggaggctttgcaggagccattgcctataaacctttaacatttaggagaaacgtaccccaagacctgtgaatctccaaatttaaaagtaatagaataacatttatttcaaaagatacagcatcataaaagcatttatgtggtctctccaaactttttttgagaactaacgttccgaggtattggtaaggaccagcagtgctaacacaccacattaaatcagcaaccgtgtggtcggggagccactgactgcctcatgtcattgtgacccgtagaggagccagcaggagcttctgggatttcttgtcaacactccttcctcctcctcctcctcctttccgtggagtcagatgtttattacaggccacattgtgtggtgaactactgtcttgtaatgtactttttgaaaatttacttgaagtgtaaatagactggaatggagaacattaaatgatgatcttgtttctctgtagcagtggacagggaagggctgattaggtagggtggaggtagatttggaataattgtgccactttttggtttttcttcttggacttatacattaggattgggatatggaaatacagttgtatgatgataaaaatcttttatacagatgaaacaaaaaaaattaatgttctttgttctcttatgtaaatcagttatttgtttttaaaggctgttgatgacataaacatataaaacacctaccgagattggcagtggaagttgtaacccatttgtaaaatcagaaatgctaagtactcctttaatgatgcaacgaataaagtgtctgtgtctgcgaggcacagcagtgagtcctctttgttttgctgtgctctgaggcgggcagcatagggattgagtggcaccagtgtttgactgcacttgcctctccatgcctcgtgacccccgggaagctggcactggctgagctcagctctgtgggcctttcttcagcactgtgggtcgtaaaagctgccttttctttgaaaactgcctgcgtcctctgggttcccagcgttggtgggatggagctgtggcgtccaggctgtgaggtctcatggggtcctgcagcagccagagcgtgcagaagacgaggaggggaagaaaggtggtaagtggcacccccggctgcgccccgaggtcaggaaggccagcaacctcctggcagagggagtgggcaccccagctggagtcagggagccaggcctggctgtgtgtttgaggaaaagttaagtgtaacttgcattgtttggttgggagtaatacaggaattgtgtttagcaccctatttgaaaatagtgtttaagactatttgttgaattaaccaacttaactattttaacaaatgtagctttttggcagagggctctttcaagtagtttttggtgcttatgggaagctttcatttctacaaccagcgcttagtgctgtgacggacaaaaggtcattgtattttattcttctcatattcgtgctagtgatagtttctagtggctgctttcttatctcacataggaacatttttctgtttgaaaataagtatataggtcttcaggtgtgcagtgagcagtattggtaagttggtatccaatatttgtaattaggaagctaaatcatatttcctatctttaacattgaaaaggacttttctgatacgtctgtgacagatcttatttcatcttatttagctcaagatctcattatgcttggctggcttcccctgttgttctggaggacaggcctggtttcgagtagcgtctctggggtgtggtggctggcatcacggtttacctctgctcaccagacctttgacatttgtgttcgacgggaatttcgtagaaggaagacattgtggttgtggggtcagcatttcccatgaagagccagctccctgcagggcccctcgctctggctctcccacggtcgtctcccttgaatagatcccttcagggatgagcctgagttccttgtcaccagtggaagagcctctgttttttttcgcccaagtagtttagtaagtgatttaatcagatttgcatttactcaggaatgactgtattcctttctcagagtttacagtcaacagtaggcaaacagagtaacgacccgggttgtctttactaaggctgaaatttaaatttaacttgatgacttttttcttaaatgtttaaatttacatttggattatcaaaaatgatggggacagactgagcatgtttaatatctttattacttctgtacaatttcttttgtatgaataagtgagaatgtattgttagctctgggagacaaatagcacatcttgatgcatgtactagatgcgcagaaaatacgtgtaatgtgatttcctgatttaaaaagcactagctctgtaacagactcgggtgaaaaagaatggaggcagggattccactttcttcacttacgtcaggtccttcaggatcctcagcgtgctcctcagtctcatgccaaagaagacagtgtggtgcggtgcagtggcaggaggacctggggccgctgtctggctctgcttttctcagctgtttgagttgggagaagtcagcttctctaagaggaaaagttttgtgtgcagagccccttgctcggtgccaggagtgcgaggagcacctgcagttcacatccaggtgccttctcgtcccaccctgggctgggcctttgctgcagtgatagctggtggaaagcattcctacttggtttcatcagttttgcactttatatttatctgtcagtttttaagacttaaattattttggctaaatttgctacactagtacagggtattgggaaacattttaattttaaggttaatttataattattctgctatctttaaatgaagtagtaaagattgttaacattgataaacctttagtttttaataaatgtggtaataaggtgtctgagactgtcatattcactagggaaagtctgtagttcccagaaattgatttcaatttttagatgcaatctaaagagtaaactgtttttttagttgagagtaatattacatatgttaaaatacatagatttcaaaggcacagtccagtgagcttttacaatgtatatatctgttgtaaccgctacccaaatcaaaatacagaacctatgtatcaccttagacatttacgtcattctcctttccttgttgtccacgcccccatcctacccttcacctcttctctgatttctgtcaccatagattagttttgtcatctcttagacttaatacaaatgggatgatgcaggatgtccttttgggaatggcttcttttgcaccacacagtgtcgtagagattgatctgtttgtccatgcagttgtgattcttggcggcttctcctttttatctaaacagacatggcatctgatgatggaattcatgctaggtatacctgtcagatacggttggcagtaagataaagtcagttgtatggccttagtaataattcattacatgggtttaacagtcaataattgcaaagaatgatgatgatactcaacactttagtattacatagaagtaacagtgtgaattgaacaatggcgatgaactgtccaaagtgtataaatcttagtgtcaaatagcaattgaaatgtcaaataacacttattcatcatttattataggtgctacagaatattttagaaacagaaaatgaatattctaaagaacttcagactgtgctttcaacgtacctacggccattgcagaccagtgagaagtaagttagatgataaattgcattaactgtaaaatagtctaaaccttaggctgttctcttctattttcagagaatagagggttaaatagtgaaacaaaatttagtgtaccagtttgccttagacatcagctgtttattaggttaagacttcaataggacattgggatggcaaaggagaagaatataaataaaactgtttacatatgtttactgttatttttcttggctctaggttaagttcagcaaacatttcatatttaatgggaaatctagaagaaatatgttctttccagcaaatgctcgtacagtctttagaagaatgcaccaagtaagtaagatgctaaaaatttgcaacactcaggttggtataattggtatttaaaggattaagtgtgaagtaattttagaattcacatttctaaagatgcaaacttaagttattttaaatcttttgggtaaatcagcttttacagtaaaagctgtattttagactgtctagtttgtatagcaggaatcttcagagaaagactcaagaatggtgatttttaaggtgttccatggaggaagagtcgggatgaagagcctctgggagagaaaggagaatggcctgacaccaggaccactgaggggacaagtggctcagctccttgtgtgccctgagtgctgcgcagggggccttgaaggccaggtctttccccaatatcctgcagcttgcctgctgtttctggccttccagaagcagatacagtgcttctagaaataacatattaggttggtgcaaaagtaattgtggttttggattgtgaattttaaatcataactaggctcagacacatctttattaatcaagaccattccagtcaacacattttcaccagtgagaaataagttttattcttgtagcgtaaaaatctgtgcttcaggatttgacaaactcttggaaagcactttctgcatcctgctggttgtggaagcgttttccctgcaaaaagttgtcgagatgcttgaagaaatggtagttggttggtgagaggtcaggtgaatatggcagatgaggcaaaacttcacagcccaatttgttccacttttgaagtgttggttgtgtgacgtgcggtcaggcgctgttgtggagaagaattgggcccttcctgttgaccaatgccggctgcaggcattgtagttttcaaagcatctcatcgatttgctgagcatacttctcagatgtaatggttttgtggagattcagaaagttgtagtggatcagactggcacagaccaccagacagtgaccaggacctttttttggtgcaagtttggctttgggaagtgctttggaacttctcggtccaaccactgagctggttgtcgtataagaaccacttttcggcgtatgtcacaatctgattgagaaatggttcattgttgtgtagaataagagaagatgacacttcaagatgatgatttttttgattctcgctcagctcatgaggtacccacttaccgagctttttcaccttttcaaattgcttcaaatgccgatcaactgtagaacagtcaacgttgagttctttagcagcttctcgtgtagttgtaagaggatcagcttcagtgattgctctcatttggtcgttgtcaacttctgatggccggccactacgctcctcaccttcaaggccctcatctcctctgcaaaacttcttgacccaccactgcactgtgtgtttgttagcagttcctgggccaaatgcgttgttgatgttggaaattgtctccactgctttacgacttactttgaactcgaataagaaaattgctcaaatttgccttttgtctaacatttccatagtctaaaataaacagcaagtaataagtcgttagcaaaaaaaccatcaagcgagaaatacgcattaaaatgatgtataaccacatttatttaagaacatgttccaatatcaaatggcaaatttcaacaatgcagaaaccacaaatatgtttgcagcaacctgatgtaacatgctatgctgatgaactagggctttgaggctttgtcacttttccaaaattttcctttggagggacagaggcatgttctgaataatcagccatcagtttttttctgtgtgactattttattttcttggtttacatcagacattaaaggatatttgttaatttcctgccaggtgacttagaacagtagtgcacatggaagcttttaggtttcagtagtctatcaggtgaggtttctttacttgtgggtttgatgaaggtgacacattttatttttaaattatctttgatctttattcatataacccccagaaaagactacagtacattatttccttggatttcggttggtctctggtcttcccttcagcttgtgcctatttaggttttgaacgtggtgagggagtggccttccttctgtgccactagttcttgcagttcatgacagtttaccaaccatgatgaaaatactttgttcccttacctttttggctgggctttgaggttttgtcaaggcactttatactggactatcgatatggcaaggaaagctgaatgccagagtaacagaatattattagaaaccgtaagtgaatattctatagaacttaagactgtactttcaacccatctgcaggccattgtttttacttttatagcatttttggtttgcataaagtggcattacttacatgaccatgaaagaatagcttgggaatcactttgattttcttttggtgaatgaaggtcatttgctgataattcaaagtctttgtaagagttcatattgtgctcaagatggaagtaaatgcttgcctctgtttttctcattggctgtagataatgtggtctaacaaattattacagtatattttaaaaatacagtttgcagtacctctgttgggcattatatcagccctgcgaattattatcctcacattactcgttaaaaagctgaaataaaggcagtaaagtaatcgcttgaagccatgtgtttactaaggcttcagtccttatgttatctcagaatttggtatggcttaggtattattttgatcaagtttctcaaattttatgctacatgtatacgaggtgttagagttccacggggaaatggaatgtactagacgaagttttctttctcagctatttctcttctttttattatgaatattctgaaattttcatcatttccattttaagacttactttcgtctttttgtcctatatgtgaaatttctgtaccattttacagtttaccaaatgccatatatatgtagcagtttcatactcattctttttttttttttgatacagaatcttgctctgttgcccaggctggagtgcactggtgcgatctcagctcactgcaacctctgcctcctgagttcaagtgattctcctgcctcagcctcccgagtagctgggattacaggcgtgcgccaccatgcccagctaatttttatgtatttttagtagagacggggtttcaccatgttggtcaggctggtcatgagctcctgacctcaaatgaaccacccgcctcagcctcccaaagtgttgggattacaggcgtgagcaaccacgcctggccttcatattcattatttcttttgatttttttttttcgtctctacacagacttgattcgtagatgtccaggccctttcacagctgcctgttggttagacccaggagttggcaaactatgggctgggtcagattccgcctaccacctgttttctataaacaaagtttcactggcacgtgctgtactttttcattcacccattgttaatggctgtgtttgtactacagtggcagcagtggagttgtgatagaaactgtctggctcacatacctcaaatatttactccttggctttttatagaaagttggctgacccccaggtgagatgtgctttcttccttggggcctcgacctggccctaacctctccattccctgtgcgttctgaggcccatgtttgttttctcagtatttttgccatgtaggacttctgtcttccgtcttgaaaactgaagtttctatctggtgtcatttttcttcaggcagaggaacactttagttttttgtaattcaggtgtgttactgacaaacatgatcttggattttgttgtctgaaaattgctgccttcgttcctgaagatttttttttttcccatggatactgaactctgggtaacagatttgttgtttcagcatttgaaggatattgctccactgtcttttggccttcactgtatctgttgattgtatctgatgatgacctccattatattctgatcagcacaatttcagatagttgttccccgtccgcttcctagatttttgcctttattttaggtttttggcattttgacggtgattatctcgggtgtggttttctgacttctcgaacttgaaaatttatgtcttttaccaaatgtggggaatttgcgggcattatttcttcaaatattttgctgctttactgtttctactctgccttggggctccagttacacccatgtagaccttttgctggaggtcctggatttgctcgttgctttctgacctggtctctgctctgttcttcaggttgaatggcgtctgctgtgtcctaagtgttcactgtctgcctctctactctcttgttcgtccccgtgcaacaagtttttagtttgagaatttttttcagttctagaatttgtttcgcttaaaaaaagtgtttagttctctgctaagattttatatttgttcattcactacaagaatatttttctttatatcctttagcaataattagaataactgctttaaggtcccatctgctgattctttattgtgaggatgggttacgtcttcatgattctttttatttctagtgactttgaattgtgtcctgtttactgtgggttgtagactcttgatcatgttaggtttccctgaagagtattgatttgcttgtttgacaggcagttaacttggtcaggctcaaattgccaactctccctttggcagatgctcaaatctcagtccacttattttagactcagctgatctgaagttggccttgcaagttctgttctgccgtcagccagagatttgggcagaatttagagacagaattcagggtcacactcaccgtgggtttcccccagcttcccagcaactctggtagaaccaaaccctgtggatttttgttggagttttagctgttccacataacaaagttggctgccattagcttaatagttgagaaagcaggaggtgccctgcccgttcttttttccaaatgtccatccttccccagaatatacctgatgctaactaaaaagtgattcaggcaggtctcaatcgatagaggtttacgtagctgcagttgaggacgtgccaggtaacaggagcatttgtgctttttccaaagctttgagaagttcagtatttaaaggggaaagaacaagcaggaggggaaaaaagggaggctggggagcagtgaggcagatgcttaaacattgttgtgagcctccgattggcctcagtaagcctgcattttacacgggaaagggggagtagaggaaagtcagttgtgcgtttttctcagggttctctttcacgggaagggtgatttctgctcttgtccttgtctgtacctatgaagataagctggtacttgacattgccagggtgagatacaatagaactcggttttagggctagtttttagtgggggacatatgttctgatagatttaggggctcacaagaaatctccttgtgagcactttgtgaggaaggccatctggggagctatgtggccttctgtagttgtgggcacctggcgtatggatgaggccatgacacagggttgtggaatgacagctctctgttcggcaacaaaaggcagacagtgttgcacagttcagttcccaagcttcactttcccactggcatagtgagtttgggtcccaagattctgttatctttcatgctacttttgagtgcctctaggcagttactttctatatgttttttaaagtttcgatgttatttgcaggcgagtcagtttgataggagtaatttggctatagccagatttatagaacccatttccttttagtttttcaaatcacagttcttcctttcatcagctgtagagggctccttgcaagcatgctttgtctaggctttcagttcaaaacaatagaaactgcaatctgccttccatgcccttgtgccatttgctgcattagtagcggcacactgtcatttgtgttgtgaggttgtgatagctggaatgtgcccagtttgcctagagcagctttctcaggtatgcgtgcattcggcgcttgtgcacacgctgccaccacgtgcgtgatgctggctggctgctgatagagcctgtcctggtggagcttatagtctggtgagggagacagataattgaaaattgtataaatagttagaaagctacaattgcagaccttcttacgaaagaaatcatatcaggcaccaagagcaaacttcaggggaagatcactgagcactgaggggtaaatgggaggtaaccaggcaaaaaacgagaggaggtttttcctcacaccagcacttcgtcaattgtctgacactgagtttccagtggttcagttctattcggacatttgtctcccacgagactgccacatttcaaacccagctgcaaatggggtgcccaagctatatactcctacctgactgagtacagatttgagggttcccatgactcccttcaggtttgataatttgctggaatgacccatgtatgtaactcaggagagtgcttgacttcctggtaccagtttattatgaaggatgcaactcagaatgagatggatagaagaaagatgtagggtaagggatgggagcagagtttctaggccctctgggtgcagcacctccgtgctttcagcaacccaaaatctctccaagccctgtccttggtggtttctaatgtaggctctgttaggtagacatgcatgattgactagatcactggacattgctgagtggcatgatctccagccccttgtcctccctttaggttgctggttggggctgaaagttcctgtgatcatggtggtctttgtgacacctagcccccatcctgtaagctgtctaggggccgacccagagttacctcgttagcatagactcgggtatgacggaaaggggttcatgatgggtaacaaaagacacttctgtcactcagaaaattccaggggctttgggagccagggacagtttatctgatatcacaggagagagagcaccctgaggtgggcattggctgtggctggagcctgtgaatggagaggagtggaacagtaggagcccggacgggcaggcgagatcaggtcctggagactttgattggatcttaggtgactgtcaagagtagttggaagccgctgatggatttgaagcttggcagtatcatagtcggcactcttctgtaaaaggaaccgtatgctctgtgatgagtggtctgggtggggcagagggcaggaggacacagagactccagaaaggaggatattgaattttgtcgagattcttttccgtgttaaataaatatccgttaccttaaaagccactgacttataatcattcagtggtaattttgtggaggtgtttataaaagttacttagcaagtctgtttttgcttaggcattgtagttagtgcttctgggatccacggctggttgtaggcagcgtcttctcccagaaccactctgaaccaggaagtaggtcactactttcacatacactcatgcctgcatgcattcattctcccggaaccactctgaaccaggaagtgtgggtcaccaccttcacatacactcatgcatgcatgcattcattctgtttttgtttttcccccagaatgaccctatgcctagaattcttttgtagcttatatgactttttccaagcattcctttatccccaaaagggatctctttgtctgtggttgccactgtagttgatacttccaaagtgggaggagtgccctggggccttgtcctcctggggtccttgtgtggtcctggaaggtgcagcgggtgatttgcttagcactggggcagaagcctagatggcattccatagaaagcactagttaagatggcataaaagagttagtctcattataaaatatccagaagctgtagaataggacagagtgaaaaaccaccaataaactttttacccagatgtaattattgttgatactgccttccacttctctaagctttggtgtatgggagaacacatgcataattagggccaggattgagggcctgcctctagttaagataagatagtgagtgctctctcaggagagcctgcctgttgcatttgggcagtgaggtaacctgatttgacctcagtatggggcaggtgtgaatagcacaggcagaggcttctccttcctagatgtccagtacagaagacattacatgttttgctgcaaattaaatgattgcagatgtgaaaagaagttatcccagaagagagctgtagaagaattctaaccactttaatgtcattaggagagtttttcaaatactttaacggcagctcatgtctgtctgatggctgccttactataaatatgtacagtgaacttccatgtacagacctactatttattgaattcttagtgtgttcctggtattttttcagttattaactcattttatcctttaaaggaccccatgaggcaggtgtttaaagataagaaagctaggacaccaagagggtgagggatgtgcccaaggttacacaactggtaactggggcctcagatttggagacaggttgtcttcattcgaggtatgtatgtgaaaggttgattctgagagtccctgattcatagttccacctctttcagttggcagtgcttttcgcaggcctggcagcttctcaccccaccctctgctgccctaaggcagccccagcgagagcccccagccagttaggttcctctcccagggccaggcccagcagcagctggagcccaggcccccttctcctgttgggggcagggcccctgcctcactttgggacaagaaagccttagtggggagaaataagatagtgagtgctctctcaggatagcatttgaaatgcagttttccttcaaactattgttctatgtgtcggagaattccctgtactacatgatttactgtagaccctgttacagtatgatttagagagtctttggactagtctgggaatgtggaacagtggtttgtaaaaaattgcctctatgggaaaatgaattcttggaatctaatagtatcttttaaacgagtttttaaaataaaactgataagttgggaatttgcttctagtttatgatagaaaggaggttaaattctgttgaaaatagaacctcagaagccctcttatggaacatccttgttgtaccaaattttattcttacttattttgatggtgactcagtggtgttgtaatacttcccctaaagaaatactaaaatacccagtaactctccgtctctttgtttagatgccagcgcatgggctggcaaacagtggagatagcaggatttgccctgttcccgtctcagatgtacagctcttgaaatagtgagggtgcctggatcactgtaccccagagtctccaccaagcctgggactaccacactaagcttgttgtgtgtaactgttgcttggggcagctgcgaccatttcaccattcctgcttgagtgttctgggtgctttccccaccccgggtccccagcctcccccgatccctatactttgtgctgctttggcgatgttcagggccacccgatgacctctcgcaacccagttatcacagttcaaatgtctcagagcattttggctctgctgcatgccaccatgtgatacatgggacgccttttcctcatggagtttcacataggtttctgatggttctgccgtgttctctggctacctgggagatcacaggatgccacgcctgtggaggactgtgagggaagcctacccttcttgtagctcaagttgaaccattgtggtgctggttcatgggtgctattagtttagagggcaaggtggtggtgaattccatctccagtcctttactcagattgttctaatatgttgtacattttctgtaagatgatagtgaaaacagtacatcaagagaaaaattttcttctctagagactcattctcagcatatttgttgtttgaactgtttttaaataaatcggttaactgcaatgtttgtaattttcagtttctattctggtgacagtttttttaaaaatgtgattttgagtcaagttgtttgagaggatatgggtgccactaacatgaaggccgggctcagaagaggattcgggctaaggcgctgagtcactaacatgaaggccgggctcagaagaggattcgggctaaggcgctgagtcgctaacatgaaggccggcctcagaagaggattcgggctaaggcgctgagtcgctaacatgaaggccgggctcagaagaggattcgggctaaggcgctgagtcactaacgtgaaggctggcctcagaagaggattcgggctaaggcgctgagtcgctaacgtgaaggccgggcccagaagaggattcgggctaaggcgctgagtcgctaacgtgaaggccgggcccagaagaggattcgggctaaggcgctgagtcgctaacgtgaaggccgggcccagaagaggattcgggctaaggcgctgagtcgctaacgtgaaggccgggcccagaagaggattcgggctaaggcgctgagtcgctaacgtgaaggccgggcccagaagaggattcgggctaaggcgctgagtcgctaacgtgaaggccgggcccagaagaggattcgggctaaggcgctgagtcgctaacgtgaaggccgggcccagaagaggattcgggctaaggcgctgagtcgctaacgtgaaggccgggcccagaagaggattcgggctaaggcgctgagtcgctaacgtgaaggccgggcccagaagaggattcgggctaaggcgctgagtcgctaacgtgaaggccgggcccagaagaggattcgggctaaggcgctgagtcgctaacgtgaaggccgggcccagaagaggattcgggctaaggcgctgagtcgctaacgtgaaggccgggctcagaagaggattcgggctaaggcgctgagttccgtttggggttgctgtgcatttcagttggagatgtcacaggggagggtggaagcggatactgggagctgcagacttcccacccggcctactgcatgtgtgggaagaggtgtggcccaggtaaaggttaggtttggattgacagctctcctggtcacctgcctcatgttgcttgcccatgtctgtcccagtgtcctcatctataaagcaggggtgctggtgtcacccacccagagtcttgcggaggtaaagtggcctggtacttacggaaccatctgcaaatgctcggggccctacttggcgtctggagctgagttctcctgcagcctctgttctgccagggccctccctgtgcaccatttataacttcagttgtgaaaatgtaacttcgcactggctttggagggccctgagtgagctggctggtgttcgtgaaagaagatctgttttcagtcacattggtgagggacttttttcctcacccttcccatttctgcagctttgtcttcacttgatttcactttctgcccttaaactcggggacattttatgactgtctttaactgggggatatttttcctgtggaaggtggggtcatggtgctttcttttcagtgctgcgtttctcttggctctgtcgtttggggatgtctgacaggcagttgactagccatggaatcaggttggaagtagagaatgatttaatgaacttcatgaatggtgtaatgaattggtatgatatttcattcgttgtctggatctttttaatgtcgatattttaattatttttttcctaaaatagctggaggcaacttatttttaaccgccagctagttaagccatcattgcctgtatttggaatggtagaaaacaaccaaatgtgtctttagtcttattcttatcctacactaatcagttccttgattagtaggctgtagctatggaggaggcggtagctacggcataaaccaaagaaggcaggaaggtttcacttggaaggcgatggagaaatagaccaaacgttcaggaaagaaacattttggatgattaaggaagctttataaatggcatgtagggaggcacagtgattggaactgcgggcgctttgatgtttttagccaccatgccttctttcatagagggttacctatggcatgttctccctgcccacactcaggttctgtcctgagcctgctccggttctcagttgatgcagtatgggctccaccatccctggtctttcagtgtcacaaccagttgttagctcctgcctctgaagtcagcctttctggatcagatctttcttgattgttcagcttgtcttttcgtgtttgtgccgatctctgtggagacctttagttggcgtgcttcaggaattcactggcatctcctccttcctcctcttccctgctcactcgctctcttcgtattacccacctgttgatttctttttagaaacctttagtgtatctttaactcttccttttcccccaccttgaatcatttgccgagctacctcttctgtgcctgacctgtcctgaacgctgtagttcaggtcttgtgggttttcatggtgtctgtgcgctaacctaactgggccctgacttctagttggctcctgttctgtccagcttctccaccagcactggtcctcctgaaatggttcatcccagaaactgggggtgacaccgctttattcatttattcaccagctggtcttcaagacgtttggacaggacctgttaaaattgtggcaatttttgcttcttgaaaacagctaatttagattggttccaaagttgtaataatctacagatgtccctctacagattggacctcctttttggcctctgtcctcaggccttggcttatgagcctttcttgttgctgcctggtggggctgaaagtgggattttccccccacccagctctccttactattccctttgtttggaatcacttctgcttatcttcttactaaaatcctacttaatccttcagtcccagtgaacataccaattcttagtacagccttccctttgtctcttgtgttttgattgaatgtatgtcttgattttattttaatggtaaatgcctttcaatgtattacagacatcagtagactgagttcccatttgttgacttgtatatgataggacttcagtgtagtgtatcaaagaaaatatccaatgtgtttataagtatttaatgtaattgttataatagttaaatatcatgtaatgattttgttcaaaagttaattataaagcctaagataatagggaggaggtggagcaagatagccaaatagaaacctccactgattgtcctccccacaggaacaccaaattgaacaactctccacacgaagaaataccttcttaagaatcagaatcaggtgagtgatcacggtgcctggttctaacttcatatcactgaaggagaaactgaagagggtaggaaagacagtcttaaattgctgatactactgctccctcaacttcggcagcagccacgtagcacagagagaaaacctgtgcacttcggagagggggagggctcagtagttgtgagactttgtattggaactcagtgctgccctgtcacagtggaaagcaacattgggcacagaggtagcatttagaccagtcctagccagaaggctagtccctggtcccagcagttggaacctgagttctggcaggccccgccactgtgggctaaaatgacctggggttctaaataaacttgaaagagagtctaggccacaaggactgcacttcctggctaagacctagtgttgtgctggggctctgagccagtggccttggggggcctgcaacctagtgagacctcagccggggcagccaagggaggccttgcaccaccctcccacagccacaggcagtgcagcctgcagctccaggagagactcctcccacaaccacaggcagtgcagcctgcagctccaggagagactcctcccacaaccacaggcagtgcagcctgcagctccaggagagactcctcccacaaccacaggcagtgcagcctgcagctccagtgagactcctcccacaaccacaggcagtgcagcctgcacctccaggagagactccttccttctgctagagaataagaggagaggaaagacggctttgtcttgcagcttggataccagctcagccacagcaggatagagcatcaggcagaaccctgaggctcccggacgacatttatagacataccttggaccaaaagggaacccactgcttggaagggaagcacccagttcctgtcaggatccatcatctgctgactaaagagtccttgggccctgagtaatcagcagtggtacccaggcagaactcaccatgggtcttgcatgagactcaaagacgagctggcttcaaatgtgacccagagcacattcccagctgtggtggctacagggagggactcctgcttgagaaaaggagaggagactttgtcttgcagcgtaggtatctgcccagccacagtgaggtggaacatcaagtgggctcttgggagtccccagtttcaggccttggctgttagacatgatttcgggacctgctgtgggctagaaggcagcccactgctctgaaaggagagtctcaggcctggtggcattcaccacaaactgactgaagagtccttgggccttgaaggaacattagcaataaacaggcagtacttgctgcaggcccggtggtggctacagggagaggtttcctgcttatggaaaaggggagtgaagagtgggaaggactttttcatgtggcttgggtgccacaagaaatattcaactgcagtagaatagtgcaccagctagattcctaaggtttcagcttccgggctctggctcgcagatggcatctctagacctgcccggagccaaggagaactcaccgtcctgaaggaaaggacacgtgcccatctggctttgccacctgccgattgtagtgccccagggtcttgagcaaacataggcagtagttaggaagtggttaccatgggccttgggtgcagtccagtgctttgctggcttcaggtgtgaaccagtgcagtcccaatggtggtgactacaggggtattgtgtcatccttctctagctccagctactcatctcacacacacacacccctctctctgtctttctctctctctgtttgggagagagtaagggaagagagcaaagagtctctgcctagtaattgaaaattcttctggattttgttcaagaacaccgtggtggttcctatgtgaatcagcaagagtcacagcattactgcgtgtggggtgccccaatttaatgcagatacagctgcagtgagaccaaaaacttaaattgcaacacccaagtccctttgaatactggaaagccttcccaagaaggatgggtacaaacaagcctaggctgtgaagactacaataaacacctagctcttcaacgcccagtgcccagacactgacaaacatccacaagcatgaagtccatccaggaaaacaggaactcgccaaataaagctaccagtaaacaattctggagagacagatatgtgacctttcagacagagaattaaaaagtagctattttgaggaaacaatgaaattcaagatgacacagagaaggaaatcagaatcctatcagataaatttaaagagattgaaatatgaaagaatcaagcagaaattctggagttgaaaaatgtagttgacgtactgaaaaatgcatcaaagtctcttagcagaattgatcaagcagaggaaagaattagtgagcttgaagacaggccatctaaaaatacacagaagagactaaagaaagaatcaaaaacaatgaagcatgcctacaagatgtagaaaatagccccaaaagggcaaatccaggagttattggccttaaggaggaagtaaagagagacataggggtagaaagtttattcaaagagataacagatagcttcccaaacagagagaaaggtatcaatattcaagtacaagaaggttatattaataaaacacgaagtagatttaacccgtagaagactaccttatgggatttaataagcaaactcccataggtcaatgatgaagaaaggatcctaaaagcagagagagaaacaaataccatacaaagatgctccagtacatctggcagcagacttctcagtggaaagcttccaggccaggagactgtgggcctgacatatttaaattgctgaaagcaaaaaccttttatcctaggatagtatatctagcaaaaatattcttcaaacatgaaggagaaataaaaactttcccaaacaaaagttgagggattttattaacaccagccctgttctacaagaaatgctaaagggagttcttcaatctgaaagaaaataatgttagtgagcaataagaaatcacctgaaggtacaaaactcactggtaatagtactcagaagaatacagaatagtataacactatgtgtaaactactcatatcttgagtagaaaggttaaaagatgaactgataaaaaactacaagttttcaagacagtacagtaagatataagtagaaacaacaaaaagttaaaaagcacaaggacaaagttaaagtgtagagtttttaattaatgttctgtttccttgcttgttacattgtttacacaatcaatgttgtcatttaaaaataatgggttttattatttggaagtccatggtaacctcaaattaagaaacatacaatagatccataaaaaataaaaagcaagaaattaaaacataaaaccagagagaatcacctttactaaaaggaagacaggaaggaaaaaaggaagagaagattgcaaaacaagaaaacaaatgacaaaatggcaagagtaagtccatggttatgaataataacattgaacttaaatgaactaaactctgcaatcaagagccgtagagtggctgaatggattaaaaaaaaccaaaaagacaaaaaacccaatgatctataaagacacctatagactggaaataaaggaatggaaaaagatactccatgcaaataggaaccaaaaagagcaggagtagctagacttatatcaaacaaaatagatttcaagacaaaagctagagacaaagaaagtcattatataatgataaaggggtcaattcagcaagaggatatagcagttgtaaatatgcatccaacattggagcacccagataatataaagcaagtattattagaactaaagataaaccccaatacaataatagctagagatgtcaacacaccactttcagcactggacagatctttgatacagaaaagcaacaaagacacttgactttatctgtactttagaacaaatcaatctaaagatacttacagaacatttcctctagtggcttcagaatgcacattcttttcttagcacatggatcattcttaaggatcatctatattaagcacaaaacaagtcttaaaatttttttaaaaatgagattcatctcttaaaaaaatataattttatcaagattcttctgaccacaatggaataaaactagaaatcaataatgaggaattttggaaactatgcagacacatggaaattaaacagtgtgctcctgaatgaccagtgggtcaatgaagaaattaagaaaatttaaaaatttcttgaaacaagtgatcgtggaaacacagcataccaaaacctatggggtacagcaaaagctgtattaagaggaagtttgtagctgtaagcaactacatcaaaaagtagaaaaacttcaaataaacaaccttaatgatgcatcttaacaagaaaagcaggagcaaaccaaacccaaaattgtagaaggaaaataataaagattacagtggaagtaaatgaatttgaaatattacaaaagatcgatgaaaccaaaagtggcttttttgaaaaaataaaattgacaaacctttagtcagactaagaaaaaagagaagacccaaataaataatttttcttttttgtttctgattttaaaactgatactgcagaaattcagactcactagaggctactgtgaacaactgtatgccagtaaattggagaacttagaagctttggtagtcaacaagagagacctgccagaggtcatgtggttacaggggccccgtgtccctgtgtgtgtgtgtgcatgtgtgtgtgtgtgtctatctccaccctgagtgggagcaggaggctacttgtgaagtctcatctctgaaggccatctgttgatcacgacaggctgctgggttccttgcggctggagatgtgtatggaggttcccccagcacattgctctgtcttcatgggcatctcagtttccatctgaaatcacttgttgatgaactgagaaccattcctctgtctagttagcagtatcactaggagtaaacatgttacgggggaaactgcttagcatttgatttctcaagtgttttttctgagacccagtaatcttctgggtaaggaaaaaaaacccttgggtaccccctttcaccttgtgctgttgctgttactgtgaagatgtagatggtatgtgtgactctagctgtcatcagatcattcatggacacaatgcaacatcacacctgttagattatggctttggttctgccaggaggcctggtgggagcagctggcatgatgcgtgctgcctctcatgactcatgtgcaccatcctgctgcccaaggccttgatgtagcccctgtggggtgccctgtctgcatgttatcacactctgaagagcagcctatggagcacaagagagaaccgaggggaacatcccctcctttaattctgaactcatattctgtaatggtgatttctgtgagtctggctggttgtcgtgtgaattcaggtgtctaggcagcgttatgtgtggaatatgttggcacgttatgctcgagtcctagggctcagctgacctttatgagctttatctgctactgaattaatgaacaagggctttatcagccatgaaactttggtgatggcagtgacagaaaattcttgggagaattggtctgggactgaaagaggtaataaaaatctagagcctaggctcagtgcggtgaattaaataggaaaaaccactcgtaccgtgaattgttcgtttataagctatgctgaaatatgacttaattttcattaattgatgaaatatcagaaatgaaaatcagtttatccagatttccttttctgaatggatcggggctgtggcactggaccaggtaggagatgaaatcttagcatagcccatggcccagcactgagcagtatttctgcaatcctaagaatttaacccattgtgggtagcacatatccaataactttcctgtgccacatctctggcagtgttttctgtgcgtatacctttggcattccatcattacccagtgctcttcagtcctcctagtgaggcatgcagggtcctgtcattctagaagcccgcctcttcctgatatttcactgtgtctctgaggatgaacatcacctgctcagatgtcagaagattctcaaaacctgtgtgtcttaaagggcgtgttcttcctcctctgtaggctggcagcagtttgtagctcctgtcactgagactacataattgtcttcagtttacttctgtacaaaatgatagaactcactttaaggtagagactgtttcttaccctgtttttaatctgttcccagtgccttgtaatggtgctgcatacatatagtagttgaaattaatttgagtcagtgactaccctgcaaatggacagaactgtggctaatcccggtaggttgtggaaaccccgcttagctgttcacagttggaaatgggtctgcagcagtgcagatgctagcttactttgccttctgttgtgttttaataaactaaacagtaaagcaccataataactgcatgacacattcaggatttggaaacatggcttggatgaattagaccagtgttgttgagagcttgcattgatggaaacatgctgtatctgctagacaaatttcagtagcctctagccacgtggggctgtgaagctctggaaatgagattaacgcaactgaagaactgaatttttaatttttttaaaaaatttagttaaccttacttgaaatagctgcaggtggctagtggctgttggatttgagggtaaagaagcatggtagagaaggcaggtgggacagcctcccatctgcgcagagatctatatgtcaccgccaccgacaggaagacttgtgcatcctaacccttagcctccttgtgctgtgggcaaggtccctgctgttgcagaccccactaaattcccagtccgtgcaggtaactgttgtgcttctgtgagcccccgccagtactctgggtggggacatgtcttgctcagacagagatcaaaggagagctaagagagggagagagatggacagttaaatattgaaggagggcgttggcctttttttacacagcacagggaagagactagtatgtggagggagcacttacatttggtagatgttcttacacagatcagccacctgaacgtgtgtgggatatttttattacctatattttacatttctattgtctgtattatttaccgtaactacatttgacatctacatattgctatgttttagaagcagaggtttattttcacctctttcctgaaggccatgttttataaaactgacatgttatctagtctagaagggaaggcccagctgggcatggtggtgcatgcctgtaatcccagctactcgggaggctgagacacgagaatcgcttgaaccgggaaggcggaggttgcagtgagctgagatggtgccattacactccagcctgggtaacaagagagaaactccatctcaaaaaaaaaaaaaaaaaaaaaaagaagacccattgtgctgggaatgcttgagtctgaggagagaaaacggtgggtggtgggatttggcacctctgtcacagcgttacttcctgtgcttttctgtctccacagctattataggacgtactgataacagctcagtaaattttcttaaattgatgagaacaggaacagtctttttgagcctcggttaacagttactaagaaatgaataaaaaatggttgaaaaacagggagaagaccaagttagcataaattttgagtgctctgtgttttgaacatgaggtttttcctaatacttgtgacttgctgattctcctgactatgactttctccagccagtacttagccgcggagcggaaagcagtgctcatgaaggtggaggcacacccagagactgcatggaggtggaaccgggaagtccggggtctgaggtcctgcctgcagggttgaaaggcatgcctgccagcagacacatttgggagccagagtgtgctgtggtctgaatgtgtttccccagatcatctgttactacagatgatcaccaattggatggtattaaaaggtgggccttggaggtgggtaggttgtgaggatgcagccctcatgaataggatcagcagccttgtaacagctgtgagggagctgttttgccccttccccgctgtgaggatgcaataggggaccacctgcgggtgccttgatcttaggcttccaacctccagagctgtgggcagtgcatttctgttgttggaaaattacccagtccgcggtgttctgttcccagcaggggcggactgaggccgtgtgcttatcggtggggacagcagagcagaagcagtgtccccatgagttgtaggcctggaccttagacccaggctccagccacctttgtgttggatgctgacgtctttcatttttttttgcattcctctgtcattttggtcacgtacctgctctgggaacttcccgaggagcaagtgcatgccaggcagttaatccatgtgaatgctcacggttgactcagatggagacagttagaggaagcgatttccacccccgtttcaaggggtgcttcagtgtttctgggctctggtgctgaggagccccatgctgttcctcattctcggtgtgaacaggtgtttctcactcagagctcttcgcatccttgtttctgggcttctgaatgactctgctgttgtctggggcctcggtcttcttttggcctgtgtcgacgctcgtggacaccttcgctcttgtgccttgcactctttctgtttagtcgtgtgatgatttctttgattgacttctgcttatatttttggttttctgtatcatgaacttttattctgatgtggaatgactatcatatttcctttttctcctttgctccttcattcccctttttttaggcaaatgtatttgtcctttcatgccttcttataattaaggttggcacactaaaagcactttggaagtgctgtccgagagttgggactggttgactcttgttttctgtaggaatccctggtgttcatgtttttggtcactttttctctggctcccattccctaggtaggaggatgtaatccttctggtaatattgtgggtatctggggagcaaagacaccctggggtgcagggaaggtggtaagagttcacgtggttctcctgttttcagcacacgtgcccctgctccgggttgttgctgttgtccttcagaaactctgaggtctggagaggtgagcgtgtaccccgttaggcacacccaacactgaggcggcaccaccaggggccctgatgcccacagcttgtgccgacttgtcacccctcatgcagcttccagtgctggttctggtagtctcttcctcattctttttgttctcatgagtttatgcttcttggaaaagcctgttaactgtcaggatgctgtggatctggggaggagaggcacctgataggtgggcttgctttctagtctctaacctgaagggaaaggcggtttttgtattttttgttagtcttgatgttgctgctttggtagaaaacctcacagactgaataaccacattcaataattctccttattttatgcaaagctgaaggctctgtgacatctgtttttctcactgcccaaagaacttgggcctgagggttggttgggatgctgtgcagtctgaatgctgctggagaggacctggcagcacagctgctttctgggcgccccttctccttgctagactcaaggcagcaacacatgtgtgctgggatcggggcctctggttttcacagatgggtgcagagggaggttttccttactcagagtattatatgtctgtcagttagcagttgtcctgtctgtaaaactgatgactatttccctttgtgtcgcatttctccaggttgcccgaagctcagcagagagtcggaggctgctttttaaacctgatgccacagatgaaaaccctgtacctcacgtattgtgccaatcacccttctgcagtgaatgtcctcacggaacacaggtgcgcttgctaggcaccttggcaacagggagggtggatggctctgtgtccttcaaatagtgcatgaaatagtatgatgctaatagtcccttggttattaaagggtatgaattttaattacccctcaaaattagtgcttgagaagtactggtaagaagtctttaaaatgatggtgagtatttttgtaaaaagacaaatcttttcaatgttttccctacagcctgaagccctttggctaataggttgaaggggttagtaagtgttctggggtgtagccacaagcttagtcaagggtcctggaatcatatttcagttcttaaaactggaagtacatgagtccgagttacatcagctgtaacagaaagtatctcatttcagattaatacaggttttatacacaaaacattacattggagacccttagcttttcatcctgaaactaaaaacaagtgcaacagagaatgcacagacgttttgcttattttatgaagcaagacagtgtctgcttcctgcgaattggaggaagatgtttctcagctgtttcagttactgaggaggatctcagtcattagtgagtgttaagaattgatttgtttgaggattggcttggaggagaccacaccggggcttagagagctcagaggctcactttctgcttctaaaaagatttatattaatgttttacaaaaaattaatacaaagatttgtattaatattttacaaaaaatttcataatttcttttgaaaacagaaattcacacattttcaaaaccataaatggaaaagtattgttttagtagcataaagataaatgccattgtctttctaacttaagtatttaacttcagcttaaccgaacatttccactgaaagcctcgtcagtgaacaggtgttggttgcctcttcagaagcacatttggggctcaggtgtggcgctgcgtgggtgtcctaggacagctcagacatggcagcagggtggactcggctctggctgtggctgctcccttcaggctctgcagccttgggcagatttcctcctgtctctgggtttcagcttcctttcctgaaggaactcattcacaggggtgttacaagcattcaagctaaaactgtcagcaggtcaggtcagggtgaacgcaccaaatgctcagtgaatattctgttgtcttctattgtttcttcattttttaatttttttattttttaaaaaagaccctggatagttactgtttcctgggtgtgctcaaatataaaaggattaagattttttgaacttcctatttgttactaaagcatctgcagccctgaaaggaaacagcagccttgaacaatgtagtgaaaggaaaggaagttagaactcacagcagtggcagaaaaggaaaacccaaagaaccctccctctgcacgtcccgcttgggagcgtgggccatgtccgcagcatctccaagcgtccagcatgtttccagttatgtgctatgcccctacccctgggctgtgtccacagcgtctccaagcgtccagcatgtttctagttatgcgctatgcccctacccctgggaatttatacattgaatgagatttccagaaagcgcaatgcaagtgttaaatttgtatctctggaaattcttcaagaattgttgatggagtcatgaggaagatgaacagaaagttcatctttctgaggacctgtcctaaagatgacattgaaagtcactaggactgttagtttcctaaaatgcgaagccattcaagagcagtgcttgcgggcgtgtgctgtgttgatcctcttctctgttattaccttaatgagtgtgtttgtcaggtcttaatgtacgtgtagcattttcctgaagtaactagaagaaagaatacaggtgggtttttgagtcaggagggtctttgtgcctccttcccagggctgcccagagagtggaggggcaggctgaggcccgctcgggacagcagccccggggcaagtcaccattgctttagtgctgggagtcagagctgcggcgagaggaaggtcccccgagccagcaggtgccgccactgtggaacatgaagcttgtgtgccctcccgaggtccctgcaccacgagagttcccgctgtgttggccacagattcctccccaccccaaagacacagcagtgaattggggtcaggcttccctgtgccaaggctccttcctacctcctgcctttgtacttggattctttcttggtcctcttgccagcttttccatgtgtgtgacggtctttaagctgccacacctggggtagactaatctgctcatgctgtggagtaatttttaaggattggttcaagtgcagtgggttgaagtttaaagtcttatttgcatcctcactgtccttgtgttacttgggtttaagttctaagtgtgagccctgcgagcgcagaatgccaactctgaccgttttagcagctcagaccttctgcagcgtccagtgatggcagcaacacttgtccatggccagctattttgaatgaactatgggtgtcataatttagcctttgaaaatgatttttttcccagcagtttgttcctctgcacttggctccatgcttgcatgtgttttgtggctgccgtcagcccacagcactgtgtcggtaaggactgaggagacccactgtgtacgggctgctggcatcagcagaactgaagctgaaagagcagtctttggtcagagtagctgtaactagctgttttgttttattatggcactactttttttttttttaacttcaaactgaaactaaaacgatgatccacaaacatttataaaatttcatttcctttttaactgtatttgttctggcattgtaagagtgtcttgtggatattagaaggagttttgcttgcacatgtttcacttttttggcttctgggctttttttgagggagtggtgatgagggtaactgtttagttttgttagtttttctctgctgtaccgtagttaggaaatttcacaggtaaccctgaaatataaataatgacctgaatggatttttccttgattcttattttggtggaaaaggtacttatgtggattacatttaaaggagttgaaatatatttttagtatcataaagtttgattttcatgggactgcctgataaattctccaacacctagagaattgttggtaaaatataaattgctcctgtctgaagccctcatgtcactctattcatgctttaggaatggatagagtgagtaatgggaagaggagcacttctgagtaagaactgggcggaggggagggatgtgtgtgtgcggaacaggctgcccgtggtcagaggggccggccatgccatccacatagcaggggtccgcctggggtgcagagcgtcagctgttctgccggcagtgatggtgtgggcagtggccttcatgcaggccgtcgtctgtatcacttgcaaaattgtaggtctgccccacccagtgatgtttggagcattgatgtctgtgagtgcctgccctggtgcctagcatggtgagcagtcctgtggctcctcctctgtccttgtggtcctgctgtccacagagtgctcacagttgccccagctgagaaggggcgggggacagtggctgtagtggctgcagcagatgggagtctgtcctggaccctcctcagttccccacccatcttcccggggaaggtggatgctgaggaaagaaggcagaggacgtgtgcgtgtttagaaatgataggaacacatgcggtgtgctcatgggctcatgtcaatgcagcctgtacggtgagcaggacaccttgctgtgcaggtgttacccacagcaggcccctgaagatggcactgtgctttatttcagtaatctccagcctgggattgtctcaaggaaatgatttttggaaagcacaaagttacagacaaaagatgttgagttgtctgttgcccacaaaagtgcacttgctctcgtgcgtgcgtgctctctctcacaaagacagacaccacgtacacacactcggaagtactcttgacagtctctgtgctactaatttttaaaacagcatcaacacgatgggcagccttacagaaataattatgaagccttatatatggagttgataaaatgtttcttgtcttaatttttttacaagtggatatatgcaacattacccttttttataatttgctttagtattgataatatctgttaagtgtgtatatgtatgtgtttattggaagtatttcttgttggcaagggcagacagaggtgccgcacccacatcgttactgtttttacacagcataggactgcaccctggccttggttaatgagaccaccctggttttgtagaaagcgttgagatgtaagtggccttctcagaaggtcttacgtgcttaggaagtggaaggctggtttcctaatgactgtttggttttcagcatggtgtttgaatcggtttcattggaggacattctccctggctgccctggcaggggatccacatggaataaggagggtgagaagcgggaagggctggcaccaccctggctctcagtcctccttatgggaagctgtgtttaggttgaactctctgaaactgttaatgttcactatttgtggactcagtttcctctgggttagccaaaacactgtctgtcttttccccgggagcccttgatggttctggtgtccccgagacctctggcagtagccagcttggctggggtggtgcggtgggaggctcctgtgagaccagaaccggaaattggcttgtttctcagttttgctgttaggattttcatgtttattttaggacatcgtttacataatgaggatataaaagtatcttttccttttaagggaaaacctctagactaggaaaatttgttcctaggatttgtgccatgggtatcatttgaaccaagctctgctgactagagacccctatcttctaggatggggcgtggtgatggggcgggggtcacctgggtctcctggatgggatgtggtgactgagaagtcatcctggtctggacctggcatcggctgccagcgctggtgctgcctcccctcctttctgtgggctgtacactgtcagatgtgtggactgatggcacatgcaatttgagggacagcagacccagggcctgacagagacctcagagatcgccagtgaaggggtgttgcggtcaggtgactgtcagccttaacaaacgtgtgggtgaagagctggaccccccacagaagcctgcccgtgtcctctgccacagccatgggaactctgaggacaaagatgacacacatgaggacccactgtagggaaagataggcgaggcactgtgaaggggatggttgaagaggaatacagaaagttctaaaacttgtttctgactctttaattttgggatatgcactgtttctatgtccatacacagggacaccttccttccttacgtgttgtgaggattgaatgtaacaatgcttttgaagttctaaagcgtaaatcaacattcgctgtctgcacacagggacccctttcttcctcacgtattgtgaggattaaacttaaagcttttgaagttctgaagcctaaatcagcgtttgctctcttctcttgctgcttctcgtgctcctcaccccaagagccattgcctactcccaggctgagtgctggcagcacataggtggggcctgctcgctggacgaactcgcatctggggatgactaccatcagtgtgctctagctctttaccggagcagctcggtccttgttctaccaccttgagactctgagattattggaatccattctggctctgagtgtgcatgtttccattggatatgtctgcatggcactgatgtgctggaggacctcgccatcagtaggatctcatggagacccacatgtcctgtgctgtgtatagttattgttgctcatatgagagcaggaacgggaccccttagggatgggagtcccctttggcatttccagataagcagcgcagatttgggataaaagctggagccttccagatgttaaaagcaacacttatgtttcataaattctggctgttgctcatggagatgagagagccaccattgtctctcattgctaaccacgagtgtctctcttgccacttgctgcccagtgaggagttgggggagttcatggagaccaaaggtgccagcagccctgggattctcgtgctgaccacgggcctgagcaaacccttcatgcgcctggataaataccctacgctgctcaaagagctcgagagacacatggaggtactgcgctttcattctcttacttggagtccttaccaagggttagtggcatggtcagacttactgtgaaagaaagtattattcatgatttattttagaagccagaaccaacagagtttacaaagagttttgttaaatattatgtttttctccttattccagctctattagaaaacatttaccccttatctctcttttacccactgctgctgattgaaaagtttccaaaagctgaaacatgagaactgattttcagatagtgttgagatgtcttacctggatcatccagctacaaacaatgtgtgcataggttatagggtaatactgtactaatcatttgatgaatgattgtgctcttttaattttgaataacaggttgcagcctagcagaaatttgggttgaagttactctcttggcttgagttggcaaaccttttctataagggggcagactgtagggtcttcttcacggctacacagctctgccattttagatactgtatgtgagccgtggcagtgttccaataagactttattgatgaagcaagtgttggcttccccacccctgctgcttgtgactgttctcttccaacttatatttccccaaagtctaatggcttcgtgatttgctgaaagactgacactttaatgctgagggaaaaagggaatgttaagggttgaaaagtgttagaaaagtttcaagctggtctgtagaaagtacctttttaagaaaagcttttccttatgaaagctaattgtatgtttcttttactcaaaggattatcatacagatagacaagatattcaaaaatccatggctgccttcaaaaacctttcagtaagtgattaagcatattgttttcccccccagacattattgtgacaaatgaatgtaaaagaattatcaactgaaaaagtcaaatgattaaaaaatgacttgtgctgacatgaaagaaaaacagagtcggcattctgtggctggtaaactccttttagtggactatgatagaataattatttaaattttttaaagtcactgtgtaattgatgttagatctactttaaaattgtttaaaacatttttttacccttcattcatgttgtctttaatgatttattgcaaaacagaacaatggtggttccattttctctgctgttgtgttgtcttaccaactgcgttttggaaatatatggccttattttatagcacaagttatactttctgtttcttcttttcagtcttccatattggcaaacacgaacaaaaccagaatgaaaatacagttcttgtcctgtccacatttcttttttgtacaagtggcaaaatgtgctctatctttctaaaataatacttagtattccagagcagttgtgtgtgttgcttctcttaacttggtttcatacttctaagcaaatactttcaattccctataattaagcaaatcgctcaataaattatctgtctgaagaagtaagatataaagcaataattgtcttaaggatgatacaaagcaatgtggccggaacttaacattctgaaagtttatgtctgttaacagtgttgttctgtgtctgtcaggcccaatgtcaagaagtccggaagaggaaagagcttgagctgcagatcctgacggaagccatccggaactgggagggcgatgacattaaaactctgggcaacgtcacttacatgtcccaggtcctgattcagtgtgccggaagtgaggtactgctgcccacatgcacgcaccagggtttctgtcccactcttaggagctcatagcagaagattttaaaggcatctcaagcgatgaaaaatgtctaatagaagctctatcttataatttgtgagctactttttattcttgacacaggagagaggcttatggcatgttagagaggcttagagctgagtgtggacttgttgatcagtttgatccagctgaagtcagtgtggcccgaagcccacgtgaactgaaggatagatagtgtgcagaaagacttgcaggagtcctgtgcacacatccgcatggagctgtatgcgcttatctggccagcaactttgtaccaaggctcactctcacagggacctgctgctctcaatgctttcgggtcattatactttcctgtgaaagtatgctagctgacatatgcttacaggagtcacagttttcttacaggtttggtttaagtgagagatcaacccagatttttgggacatacccacccacacagtgaaaatcgagcagtttgtttcatgattcacattgacatacattcaatgggtcactgaacaggcacctctttctgaattttattctacctttgcaaaaataacatgatcaaaacatgcgaaatgactcatttttgaacacaagactccaaggagaataagaaaactaaaacttcaaacttatatagtgtgttttcctttccacctgtaaaatatcaccccttctacatagtcttgtagtttgggtaccataagaaaccatgattataaaaacttcacatcttttcagaagaagtttctttttgagtcatgctcttttaaactttaatctgtggaaacatttcccaaagtgtgttctttataatattagatctatacagcactggtgggtgttactccaaaatgcttcagagtggttctgatcacgactgaacgtaattagtggaaaagattctttatgatagagctcctcagagacttggctgtgaatgttcccaatgtatgttgtgattcttcaagaggggaatatagcaagtcgttctcagtgacttctttaaagtacggaagactcttttctcaaggtgctttgcataagcctaatgttctgaggaatatacttggggaaactaattcctaggactgatttcacttttttgggccgtagtttaaatgtcaacatgtgaaaaggactgtggcatttttttgtctctttttggattcttaggaacttttttctttcacttatggtctctttggcttttatcttactgaagcaaatgatttttaatacataagtaatacttttaagtctgatgtaaaccaggtgatgtttatggggtggatgaaaacaacactgagtcgacatttgggaggtttgggaagtgccaggaattactagtagaccaaaattgattttaacattttatcctttctttagcttaaagactccacctgttccccctgaccccattaaaatttataggttctctcctttttctctgaaccagaaaaagaaaattttagcttacctgaaaatagttaatcacagagctgaactctttaaccaaatatagtttcaagatgttacacaggctaattgtgagtccaggatcttttaatcagtccgtttactttcttaccttttgttttttgaagaatttggaagtccttctctttacctatatgttaaagctctctcataatcatatgttaagacttaatacagaatttatcataattgtttccatttaatttacctgataaaacttgatagaaatacctaaacgagaaatatcatgtaatgtttcatagggcctagtataaataagtgaagtatttgtgctcacatttgttaagtagatgttttttaagaaatgttttggatttctttttttgtattaggaaaagaatgaaagatatcttctactcttcccaaatgttttgctaatgttgtctgccagtcctaggatgagtggctttatctatcaggtaaaacacaatttaaatttatattttattgtggatctgaggataatttcaaactggctttgaattttgtgttaaatattacgtgtatctatctgtgtatgtgctgtgtgtgtagtgctgtatattcagatatggacgtacagctcctgtttgtgtttcgttgtgactgcaagcatatcctatgttaatttcaaaaaaggaaagaagtgtaaactgtagagcaacctcataaggacacagactactgtggcacaagtcagtctctgtcattgccttctgtcgtttcatgcaaaataccttgctcctccttgctatggttttattctgtgaaattggttcaagtagggcttgtgggttagtggggtagtgtagactaagatcttgtgtcagtggcacggcaccgcccaaatgcatcagcaaacagaaagtgatgtaagggtgtaagtagcagtgtgtgatcgttgaacctttttaatttttgtttccctgcttctctttgagaaaatgtgacagcagatttgggaaggaggtgcaagggtgagcagggccttttctgttgcgacagtggtttatagtggtggtatatgaaggagctggtattttcgctgtctgtctagtagatgcacttggcaggtttcattcttctttttctgggaagttacagaggctcatatccttcccatcaactttctgaggactggccagtcaccacgtaaccactgcagcagaagccgccacttcgtgttctctgggttgcatttcattgtagcacgtgttgttttgtgttggcgcagcaaggacgttcaagatccctaagcagacactatgccctcacagaggctctgccgacacccagagaggacttgtggccatacgcttacaccaacacacgtgctttagaattggtgaatcacatatgtaggaacagactcaggaaagtgaggctgtagtttgttaggccactgctgaagagaggtgatctgtggctaggatagtgcccactacagtttcccccaaactagcagctacttctgtgttaaatgaccttgataaacctaaatctctgtcctttctggtcagcactatctggcttccgattttatatccccagaatctcattccagtggctggaggcaggggccttctctaacctaaggagagaagaggttgtcacttgtggcaggcttgagtctctgcctgtgtggctggtgcttacactggatttgcccttgatgtgttgacagactgctggagctcatctcaacaacaggattttatttttccattcttagcacagtggtgacccatggtctctgtatcattggtatccgtttctaccattagaacactggctttgggggatgccaaaaagtgttcggtccagccacagtcatagtgttctatacaccgatgttcagaggggctaggttaaacacagttgtgcggtttcattttctgtaggacttacagctgttaaagtacttatatgcattacgaatcttggaaaggagttcacagtgtgtagcattttttaaatacgcttggccacagaagtgtccagcagtctcctcttccaccggccatgctttaggatgagatttctcagcctgggcactgctgacgttctggactggatcgttcatggccaggggctgggggtctcggtgagactgtcctgggcactgtagggtatcagcagcctctctggcccttacttgctggaggtctgagcccctgccaggttgtggcactgccacccattctctgtgggggcacgttccccacaccagttgagcagcactccgtctggaggtgcttatgtagaatcctgctccgcagctgatggagtgctccccaggcagcgctgcccagacgcccactgcctcttcctgcggacttggtgggccaccatgtactgtggtttctgtcagctgtgccaggatgttttgtgttcacttctgacttgtttgtaatgatcactttgtaccccctttctggtatctttccattgacatttcctggtgcagttaccgatttcttctgttttcagggagcactggtttgccaaccattttgtgcattgtgtgcagcatttagcacaactacttattttctgttttacaaagtagaatgttatgaaattcttgttcttgcctcaatttcccacccttattttgactttaaacttggaacttcctctgcatttctttacgaggaaaatacatggttcttttctgcaaaaacatcatttaaaacaactgttatacacggtagttttttaaaaatcataatgtgtgatgtcttttgtcctggtgtctatgtttagtagcagctcatcagatacagtgtgtgtttgggcttgtcactctgtcccttgtcgccagttgagtttcttgcttacagtacagtattataatttattatttgagataaaaatttttgtattatacacacatctgctacaaatgagctttttttggttcacaaacacagttcctccaccaattctaaaatcatttaatattgactttaataatggtacctttttctagaaaagcactaattgtttttttttttgtgggggggggtcttttttagggaaagcttccaacgacaggaatgacaatcacaaagcttgaggacagtgaaaatcatagaaatgcatttgaaatatcaggtgataggcacaagctgtgtgagtgctgtgtctcggggaggagaggcagcttgtccccgcgtgcagattcttgcttgcgtatttcagaaggtggtgtttaagcgctgagtggaattctggggggtgtgcacgcacgtgctttttacctgtgtttccactcggcctattttttccttctctcctatagggagcatgattgagcggatattagtgtcgtgcaacaaccagcaggatctgcaggaatgggtggagcacctacagaagcaaacgaaggtcacgtctgtgggaaaccccaccataaagcctcattcagtgccatctcataccgtaaggacttggtgcttctcctccttccagactccaggcgtggcatcccgtggctgagctgtcagcaagtgatcagttgctttaaaacctaatcaatatttggataaaaagtgcaaaacacttgcttcacatttctctgcagatctttggccctcttcgtgcagtagtgaattgttttccaatgagtgttctcgagaaacaaccctgaattgtgcctcctcacgcacagttcagaggtgcttgggtgggaagctgcttctgctccgtgtggccctagaagactgatttaggggagttttacactcaactatagatgatttttctgagaattttaactgtttattatgcttcatttaagaaaacaaaaaataaatgattatgatgatgaaaagggccagactcatgttgaaggcattaaaagaatttatgacacactgttgattttaagaaattgaggtgtcttttacttagaaaagctcaacaagtctttggatatttagagacttttttttttttttttttttttttttttacaacttttcagaatagatgaacactgaagcttcagtgtttaaacctctcctggtgttttgtgctcaagaagttggtatcgggttgttttaacagtcgtcatctttatcaagtaatacggaaaaactgggcagagcttttaaagaatgaatgacgatgacacaggcgttttctgcttacagatttcctcacatccttattaggctattaggatcagctctgtcgtgtgctcagttttcatgttttcttcttcatgtgaaggttgtagctcaagaaggattgctgtactctgatattctcatcagagtttcagagtccatctgatttctttcagcagtaaagattgtaactactcattggcttttagctagcatttcatttttaatggctctaccattttaaaattctccattctttcatggagatcagtttatcccagggacgtgtgtgtacacgtgtgtttataaagaacagtggatgagctgcttcactcaggttttcaacagcagcctgaaactctacttcatacaattttatatcaagtcagcttttctctgtggccagaccctccgtcttagtgtttctttcactggtggctgggaaggcatcccttcagcggggaaggcactgtgcctcatgtttaaaatgttctgcattctcctacagagtttcttgtgtgggatgatgtattctgtgatccaactctgaccagctgaaatcattttctaattttagcataaagcatacttcctttgactttttcaagaaaggagaaacaaaaccagacactgctttgacgttgttgctagaagggatgtcttacataattttatccatctatacattatttcctatgaaaagatgaccttacagtggcttcatagcatgacctgcatctcacacaattccctcccccatgcagggactagaatgtgatcgttgcaggaagttgatggcttctattcttgaaattgtggcattagctgccgtccctctcagcctgtgttttgaaggtcgcgcacttcctcagaatgccggccccactccgtttccagttcacagcgccacacagcttgttctcccattaaatgcaccttactattgttggctaatttgaggtcattattggctgattttgagaatgacttatttaacttttctcatttaactgtcattgtgatggaatattttgggttttccaggaatataaaatgcattaatggcacaccgctctaagaagttaatttttgattaactttgttttgattaaagttgagttttctaagaacataattggttttaataccagggtttggcagtgttcagtaaagatccagatggtaaacgttctctgctttacaggttcaggcctcttgcagctgtactctgcccttggaacacaacagcagttttagacaggcacaggcctgcctgtgtgccaggaaaacttttttaaaaaacaaaactaggcgatcaggccttagtttcgcccagtactttatcaccaggtgaagaataatacgtggctgggggggaatcaccttccttcttacagccacatgccctgtgtgcttttgtgaaattctcatctttttactagatgaagtaccttttttctataaatgttactccgtagctaataaatgtggctagtggatgtcttttgagtgctggggccccagctagagctgcccctcctgtctggggcagacgccgtgaggagccccacgctcggcccaggtggcgcgagctagtgtttggccccaaaaactgactgctgagagccagagatacgaatgaaatgataaatcctgaggtttatttcacatggagtgtttaaagagcagaaggaagtgcgtgataagtgccctttcgcggtgagcacgcgagtctcatgttctctgcccttcccgctctgtgcccttggcagctcccctcccacccggtcactccgtccagcaagcacgcagacagcaagcccgcgccgctgacgcccgcctaccacacgctgccccacccctcccaccacggcaccccgcacaccaccatcaactggggacccctggagcctccgaaaacacccaagccctggagcctgagctgcctgcggcccgcgcctcccctccggccctcagctgctctctgctacaaggaggtgaggtcccttgaccactcaaacagccagatgacggtgagcatgcctcgggccctgggtgtgcccacgtgctgggccttctgtgtacagcaaaatgcaccctaactcctagagaactgagaagggggggtctgccttggttctctggttatctgctctgctgctgagaggcccgtggtaacctgtgtgggaaggcgatgtgcagggtccccctcctttctgccatgcacaggggggcctttactgcacttgccggaggagtgtgccgccaggggccaggagctggaaaggcgctgagcccaggtggctttcactccctgtgtgtgaggccatcgctcagcatctgcacgctgtctgctgcgtctaacgacccctcctctaggttggggatcctgtccaggagccctgcattttgtcatccagaagccatttgagatgaagagaacatttactaatacaaatgaaaaacaatcacttaggcggtttccccctttgatgcataagaaatcatgatgcggtctttgcttgtctctgttctcatccggcatttttatatttgctaggcgcaaataaagtacgattccaatgaataaatagaagtgttaacacttccttacacttttacctaaaccagcttggatgaggaaaggaagtgtctttagaaatctgttctgagaagtactttcacctgaggaagctgataattgagatgagagttgttttcataagcagttgagcgtgcatggtggtgaggtatgaggagtggcggtgagagtgtgggtatcgtgcgcgtcagtgtgagcagcagtgcccgttggtggggtgtgagtgagcgtgaggatggtgacacgctcttgcctggcattgtgcctctgtgtctggtcaaggccacatttgccaagggaactggagcagactttttctacattcttgccggcagccctgggggttttaaggcccacaggaaagtactgtatgagaaattaggatctgtgcttttcattttttgttctgagtctttgtttttatgatatctttcaggtaatcatgtgtgcaagtcagaatttccattttctatcatgggaagttacttgaagaatgttgctgttccttattgtatactttagtgtgcacagtctaaagaaaaagtgagctactacaagaactggtggagactgaattactagggaagaaaattgggataaaactgttgggcaaagaagtagaaagggcaacggaaggggtattgaagtgaagataaacaattttttttgataagtctggctgcatttgctttgccaactccacactgggagagaagggctcacaccgagcagctgccgtccagtgttgctgagcaccgcccagcagtagcgtggagagtgatcttgcagggtgtgagaagaggacatggaggctcgtggaggccgctctgcagcccgctctgcctggctctggctcaggtgtgctgtgtgctctgtgaccctctgcgcctgcaggtgccctcggagcacgtgaggggcgggcgttggctcttcaaggctctccatctcaatttgcttcgaattagggaagccatgagcacatgtgtataaatgtgtcttctggaacagattgctgctgcatttctaagagctttccaattttttatagaaatacttttgtttaactttttgaaggctattttagattcagagtttgttacgtggctgtattgggtgatgctggggtttgggcttctggggtacctattacccaaataggaaacattgtacccaatgggtagcttttcaaaactcacccccatcaccttccgccttttggagtccccagggtctgtcatttccatggtcatgtccatgtgtacccattgtttagctcccaagaaaagacttttaaagataattttaaaaaccaagctttgtttcctctgtttccagcctggttcattccatagcacatctcatcttctgagtcttggtctcgcgtttagcattcgtgatggtttatgtcgttggggtgatgcagaaaccagcctttttttgatatcggtatttaacacgtgcttgacagttgacaccttacctgctctgttgggacttgctttgctcactttgttttttgccgtcgtcttctgtgcttgtttgaaaagctgtttgaagaggtaaggggtgggccattccgttgtgaacactctgagctggtgtgcatgtggcccctgcacagcagccctggccgagcttggctgtgctcctggcactcagagtcaggtagctgagcactcgctcccttttcttctccctgaaacttcaaatattttcttaaagcaattattttttacttatctgtcatttaatgacaaccttagtttcctcctctctttccagttagctgtgccaggggataggtctgtcctagggagcagctgccccctcctctcctcctccctcaggagcgtgcaggatgtctgtgcacaccagcgccagcctgcctcctggtgacacctctcatcacaggactaacaggacccaaatgacacgaggggttttattagaattaaaaaaaaaaaattagccaatgactaatactgaaaatgccctattgatttttaaaaattaacgttcagaagctggtaaagaaaaatcaaagtaggaaaaggcgagaagctcttatcagtggctataataatttggggttttatacctttacagcagcctttctgatatgccagtgaaaatgattggctttagagtatgttagcattttcttttgtctttccctaggatcttagtaagagccctaagaccatgaaaaagctgctgcccaagcgcaaacctgaacggaagccttcagatgaggagttcgcgtcccggaaaagtgagtacctgcggtccgtgtggtggaggacgtggcctcctggtcacgtaggccatggctttcctgggatagagggaggcttggtggctttctgaagactccaaacaaaagtaaggtctgccccttgaggcagtgataggaataagccacgtaacatttacccaagcaagcaggagaagcgcctttgtgtcagtggtgaagcctccgtgccagtcccggcaccactgccttatagccccttcctcatccaggagctggggccggacctggagggctctcctgctcttctggttctccctctcgcctataagatattccacccacacttcctgaagtgccagcatctcccaaagcaccctgtgtctgttagaagcgtgacctgctgtgttctcctgtgggtagcacccacccgtgctgttctcttgctggtctctctgctgttggacctgtcctgtctgctcctcaggcctaggggtctgactcagctctgggttcctatgtggcctcgcagcaagcacctggcacctgttaggtgctcggtagatagcttttgaataagtggagctcttttcagaagtaagtgattttcctgggggtgactgctgggaaggggtgcacgtgaacagattgctgtggactgatgggtgcagcccagggagagagagccagctctgggaaagttgcaggatctgtcctacagggctctgccctgccccgcccctgtgtctgagctcagcctttgttggtcctttgccttcactgctcacttcctccagcctcaggaggaggcccagcagccgtcccacacgctcactgtgccatgccactgctggcctcccctcaccgccaccttatcatcaatcagcccagtgaggtgaccgtgctggggtgttcattcttttcttgtccttgtcacctgatgtccatggcagtataagtcaccatcctgactgtccttctccttaggtagtccaggtccctgaccaccagggcccctgatgagatggtgaggccctggggtctagtgattgaagtggagctggtgctggatgcctgctctgttgcttactggctgtgccggggcttctctctgagagggctgttctgtgggccacttccttcagcagatccaggggcagcactgagctgggccgggggccggctgcagctgagaccatcgttcatggacgcgtgcttcatcagcaccttcgtgggctgggtgggaaggatacagtgtggccgaaagagatccctgttctcatagagcctatgttttagtaggaggatacagacaagaaacaaaacaagtgaacaatgtgtgggccatggagtgctgcagagacccagtggggaggacaggtgggagattcggtgccagggcgccatttgagcagcctcctggggctgaggaagcaggccaagcaggtgtctggggaggagctctccaggcctggttgcagagaccctgagcaggaaccccaggctgtgcccaagggacagtgcgctgtgtgggcccaagctcccctggcagagcgggaggtagcacagcaccctgagcagcaggcagccagagtccggttccatagacaagatgatgggcccgggttttcacaggaccacgggctgccgtgtggggaacagacaggcacggatggccacgtcgacactgagagttgtcggccttttgttttcatctggctggcgtgtggaaacacgaaaatgttttaattttcatttcttgttttagcgagattggacattttttcttagaactcttcttgttttgtgacttccttattcctatctcctgcccttttttcagtttgagagtggggatactaattttcttacgggttggtaggataatcattataaagttaggatgttcgccgtttttccaaatgtgttgcaaatatttttatttgcatttattttattttattttgaatataactcatgaattttgtagaaaacagttatctgacaagaaaatcaagggcagattatcttacttggtcactttggtcgagttgatgtctgcattgcattcgtctcgccagttgccctagaggcctttcagttcgactgtgaactgttgcgcatctcttgacaggcacagctgctttggaagaagatgctcagattctgaaagtcattgaagcttactgcaccagcgccaaaacaaggcaaacactcaattcaagtaagtttagcaataaggcctgggaagtgtggtggtttattctgtttagtttcaaattacagtctgaaggaacctgttgtggtaggccccttgcacagcccatgcgcctgacctcccagtgagtgatgtttcagtcaggggtggcaggcaggacagcagctgagcttcaggtccctaaattcatgcagctgcgtctgagctgtgggcacaattgctgtgtgattttctagataaaattatactaggaaatatttaaatagaaggtattgccagaattcataatgcttttgctaagagaagacgtgtttagaagatagtggaagattagttcagttatttcagctatttaaactgttggtgtagtactggaatttttggtttttattttgttattattttttagtttcttagaaatatccaaaatacaaaccttgagcaaggtttcttttagcctttctaaaaaataattgcttttaaaaattttttggaaatttacaactaatttattcagcagatttcagaaccacaggatttacgtgtgtctgatgtacagtgtcttaaatgaaaaacttttttctattaaggtggcttttttttttctttttggagacggagtctcgctctgtcacccaggctggagtgcagtagcgtgatcttggctcactgcaacctctgcctcctgggttcaagtgattcttctatctcagcctcctgagttcctgggattacaggtgcgcaccaccacgcccggctaatttttttgtgtttttagtaaagatggggtttcaccctttgggccaggctggtcttgaactcctgacctcaggtgatctgcccgcctcagcctcccagagtgctgggattacaggcgtgagacacagtgctcggccctaaggtggctttttttctttaaatttttcctccggtgttgccagtgaagcacagcagggtggcggctgatgcagcgtgcctgtcatttaccctgctggcatctgcgtgcccacaacagctgacatgtgggcacgtgctgctggggcctcggacaccacaggtggtccttttgagaactggatgatttctgtattatctcagcatagaaactgatgtatcctcaaatttaggacttggtgccctttccagctcgactgtcacttaatctcacttgctcgttttgttaatcacctgcagtgtggtggttccaattagtgtcatgtattgtttaatgctgagaaaaggagagagagggaagaggacttctcaactgctttagcttttatcaaagacggctgcagctgtgaagataggatgagcagggtaaatccttcacggaatctcgattatccagaagcttctttttttttaaccattttcagtattttactggtgtcgtaccatatcccgtctatgacattaagactttttgccaagggtcaacactgttggtttttttgtccatactttagtgaaaaatatccatttgtagtgactgcttatcagaataggagagaaatagagaaacggaaaggcctgggtaacccatcagaaggtggaataaatatgtgtataatcacacaataacgtctaagtacaaattgttgtgatgaaaggtactacatttttataatttgatattgatcatgttttaagtaataggctgtaaaatgtggccataaatttttggattttgaatttgagatttttttgtcatctcaatttcagttacttgaaataaaattttaaccaagtagtcttagatgaacagaccaggttcagttggccacccaaccgtgtctgtgagttctgcatttgtgaattcaaccaactgcagataactactcagaaaaaagaaacaataaaaagtaacaatataacagtaaaaaataatacaaataaaaaataattatacttataacagctatttatatggcatttacattgtattaggtactataatttagaaatgactcaaagtatatgggaggttgtgtgtaggtacaatgcaaacaccatgccatcttatatcagggactggagcgtctgaggattttggtgtccaaggggagtcctggaaccaatcccctgtgggtgagggccgactgagggctgagctttgtatgtgtcatagtgcccaccacatttcttcatgaccagggtcctgtgatacgctgcggcttcacggcccctggctgcctaaggggaatggcccacaattccttttcttttcttgtcacattgcctgtattctgtacttccatttctcctgtgcaagaaaagcattgaacgatacattgatttttgtttttaattcatattatgggcaaaccactctggggcttcagggagcttgcagtcatatatgccctttaaacctaacactcaaaactagggagtaataggagaaattgctcgcttgtgctggaaaggtggtatacttactcaaggtgtctggaaatgggatcatagtgaaagcagctctttttacattaaatgcttagtaaaacgggttttagaaggataatatattttacctaaaatgcagctctgttcaatacacacatttggatgccaagaagattttgtaaaccaaacttccttggtattgatttctaactccaggaagtaacggccctcacagtctgttatgatgtagttctcgcagtctgagaacagaggtcaatttgatagaagcaggagtagggaggggccagggctactgtgatttgccttcacctagcgaggggcatccccgcctctgcatggagggagaccctggcggcccagcctgcctctcagcccaggtgcctggccatgggcagtgctcatagttgccagccactcgtgattatttctctcctgacatgttgtgccacttcctctgtcattctccttttaacactgggacgttgccagttcatgtctctcttcctgacagcagagggtctgcattggggtggccggtgttgccagcagacccagcttcccactgcaccctgcctgcgggctaagctccagcgcgccctgggagcagggggtgggttctggggctgtgggccctgcccaatccttttctgccctctgagttctcacagtggttattgattgatcaggtaagtccagacccactctcaggtttatggtcttggcaaagagccagctgaaaaagcccgtcagaattcctttgaaattattttgcatttgatacatctgtttattgataggaaacaatttttaattagccacataaatggcacctttcccaaatgatgtcctaaatgagactatttgttaattgaatgtggaatagaattgattaattgccacatgtctatagaataatcttttggacatgggtgtgatttgtaaaagatttcttaaatgagggctttagagcaatatctttttttaaaaaagcagtttgaaacattgtatattaggtttaattagataataatcgatctagttttattctaagggttttgctaagttcgttattgtgaaacccagccgtatataaggaaaaatatgcattgttgccaatttttaacactattttctcttttccttctcttcccatcaccttttgcttttgttccatgttttggttgtggctcttcctgtcgttctcctcctcaccccctgcctgtcgcgcctgtccctccgcccgcccgtcttagcatggcaaggcactgacctgatgcataatcacgtcttggctgatgatgaccaaccaagcctagactccctggggcgtcgcagtagcctttctcgtttggagccttcagacctctcggaagactctgactatgacagtatatggacagcccatagttacagaatgggttctacatctcgtaagagctgttgctcatatatctctcaccagaactaatgcacttctgagcttttcttaacaaatgcttgttgtatcgcagcctgcttttcttagatgttttcttgctgttccttgtctcttttatgtgatattttaacaacttttgagagtgttcctgatatttcccattgtactttgtggaggcttaactgccgatgcgagtatacattcgaatgactgactattggagggaggtggtgtgttcacgtgagcctacatccgagggtgctcttcgtaaggggtagttgttgttttatagctccaaatggtttttttattctcagtgtagcaactgtttgatttctttctggatacagctgtatgaacacttttctattttatactgaaatcacacaggtttgtgatctaagtgccagaaccatggaggagactctggccttatctgtagggacctaaattttttaagtgctatgaacactgatcaagtagttgtggagagatgagaagaatatatgcagcaaaggtgctgtgagcccagttccaacggctgtgttctggtaatcgtgcagaacagcatgtgggctctgggccttggcaggtgcacagacgggcgggcgtcacgtgtgttcagagcttgtctccacctcacggctctgtgctcttctgtgtgctgcgttgtggccgtgaagtgggagctctcctttccaaaggcagagcttactgtcatggctcagatgttcactcgcatcttcaccccaaacttccctgaattgcagtgatttctgttataaggcacatagcaagcctgtaccactctacagtaaaatctctacactaacagtttaaagcccgaaagctgaagcattcagcctctgcaagtgtagactactggactgtagtagaggcatttggaatacttacaaagtcaagtgctgtggcttcagttcccccggctccccacccctgacatccatacttatgttgtctggaagagccatggacacatcattattttcagcaaccagctgcagtgaaactccatttacagcaaccccatagtataaaaccacaatgcctcattgtaatgggatattgaagttcattgaagaattactaggttgccatgtggctcacttatttaaaaaaaaaaaaaaaaaactcacccgttttcctgggatttgttgtaaggagttttcactggcctcactcagaccaatttctgcttcaaaaagcactgaatgtgacctgttgcattcagttgtagcatcaaatccacacctagtcattgcttgaggggccaaattgtgttctgtcccatgcacgctctatttggtgttaaaatggaaccttacggttgtgttttaagtattcattgaaaccagcttcagaaaacaagatgccatagtaaattgagaataacattttttccttcttcagggtggctgtaattccaggtggccgtgatttctttcttccccactgcccactccttcgccaaacccacgtattcagtgttctgatcttgtttgtgcagagtgaactctgatgcagtatcagtcttgtcctgggagccgggtcctgctgctcacaagcccagagctgccagggagctcctggcagtagcacgttgtttagaaagttgggtggcttcattcagcatggaacaagctaatggcacaggagacatcagggcagctgttaattccaaatatttgttcccaagtagctactgaactgctcacaccattggaagattttgtattttcataccaattagtaaaaataagaacattgaggagcagtcagagcccagtgttaatctccggcagagatggggtttatgtatgttcagccagatagtaaatgggatttttggagaaataagataactacaaagtttctatacttactataagtggatttagaagcgattttggttttgtattacatacggtagtcctctgcgtcagggagcacttttttgtttgcctcgagactactcattagcgcactggctaagctgcctttgccttctcgtaggcgtgggttgcctgtgtcatgggctgtgtagaccacaacactcaaacacagttgctgcacttggattttcctttaataccaagtatcatttggttatcttactgggacattttcattgatattctatacaccaaagttttgacggtttaccatcattccattttgtaccagttaaaggcattttgatgatgctttttcttgatgctaagatcactgcagaagaataacctgaccttttctttgcatttgttttgaatgtctaacaccattagcttttgtgatctggttaagaagtattagtgccacaagcctgaaaagacagttctcctgtggcagtggcgatgtggcatccagagggccattgtttctacttttgtgggacttcagtcatgctgataatagaatcttctgttcatacaattctgtaatatttatttgtacagttagtattctaatgaaaggatgaagagtctgaactagaaggtaggtttaagccatcaccaggcctttgcaaatggcctaaatggtgttccctttgaaataacgcttgccacaagtatataataagctatattaattgtgttttgcataaaattgccaaaacacagtaatgtgtatatagtggtataagatcttgaaaaaaatctctataattgtgctctttatctgtgaatgggaaaagccatttttagtaggtgactaccatttgaaaaactcaattggatgtatatctgaatgttgcattgtattgtacagtatgcatattattgtttgtggttgcatatggcaatgaagtgtttgttttatattaaaaaaaacctgttatgtacagttgaaataaattttgcatttgctagcccgtggcttttaatatttgttacatgggggaggggaatagcatagtttgcagtgtaatataatttggctcttctacctgaacggaacatcttccaaaggcaggcaggtgatagatagaacccttctgtctgccctgatagaaaagcttgcactctcttagattagccgtgttctggacaagacgaagtcactccttgtacatttcttatttcatctctttcccgtttcttaagaagctttcagtcactggcgggtttgtcttcagaaagaagcattattttttgtgtgtgcgcataaatgggaaaaagcacaactttaaaatgtttttatttagactaaggccagtttttaatttttgttttataaagtgcttatccagctaagagagtaatgaagcaaaataaagggaaaggaaacgaagtacctggtggcaggtatagtgataggacaaggtgcagacagtaaatgtagaaaactctctcagcacaagttgggagttttcctaagaaaagtaaattagacccttagagccataaataacaaaatggcctagatgacttttggagagagattactaaatcgtttttaagtgtagttgtattttgctccactgtgaatgttatttgattttcagttgattagagatgcagattttagaaaagataatgaatttaagaaggtgaattatcctgcacatgtcctggttcactggccagatagacaggtgttctcttctgatgaacttaccctgtttttaggcttttggtacaggcaggcttacacaagcatgcatgcacaccacactggtgcctgggctggacagttgcgctgcgttgctcctggagcagttagttgtgtgtcgtcagataaggccccagagtggtgtctaacagccaagcgtggtggtcgcgagctggcactcggggccccaggggttgatcagcactgtgttgctgctgtagccagtcatctcgtctatgaaatggaaatgctgggttagatctgtgtttcttaaacgaagttccatagttctctagagatgtgtgactatttggggtgggggaggggcagggttctcagacatccctaaaatgttaagttttgtgctcatgttaacacacatgtgtaccagccttctgtggctcacacctctgagtgttgctgtggggtcctggtgccccctggggtctccagtcgtgtggcacacagcagcccctgagagtggaatgcttgctgcaggatttttcagcactgggcaggcagacaccgagcatctacaggcacattcttggagtcctcgagtttgagaagtgctggattggtgttaagtataaattatttcattatattcgtgtttttcttactcccacctccatacggaaataagaaccaaccagctgttttgtgtatgtggttatagaaatagattataagctgatctagcacttctcaaaatgttagccacaaaaccacaagatgttaataatgatatttaaaagaaaaaaagttcagcactcaaatgcatttcagaaatgctgaatgaaagttaagtgagtatttttatggcagacttcatcagagcctgtactgtgctaagggtgcgctgtgattctccgagaagtgtagcccacaagatttcccgaaacgatgtgttgtggaacccctctcatctcccagaaacaaaacagtttgggaaacacagatcttgactgtgctagaaccatcatgaatgtgttcatctctgtctgagcctctgttatggattttaaataaagcgagagaacattatcggatcattctgctgttaaattgtttttccattctaggtaactcagggaataatgtgctatgatgtctctaaaaacacttaataatttctgagataacttgttaaatctgctttctaaaacatcgttctttaaagaagtagtcaacttacgtaaacctggctagagaacatttctttgttgttttttgaaaggtagtaaaaacttttcaatcattttagaaaaactgtatgttgaaaactaggcagattattagaattgcataatttctaggcgtgttaataatcctcatttacaagcttcctagttcgccatcagatccgtaaatggcatttttcacattggtgcatttcaggaatcaagcagtacatcctatctgtgatacaacattttccaccttacatttgtgtatccctaaatccttctcgcatgctttaagtgtagctgtagaaataagacctgtgccgggcacatacagtaaccgtaccagttcttagaggcttagttcctccaatcatgctacataatggaatgacttttacctttatgacttcatctgttaaaagatatttacaaaatgtaatatttaaatcctcagaacagctccagagaattagttttgccgtgctttgtaagtcatgaaattgagactcagtgcttaagtgctgtgcccaggttaactgaaaagactcaccacgaggggcgtcctggttctggctggaggcagtggacacgtggctcatggcctcacaactcccgtacggaagtcgaccccgtgtctgacccatttctttacaaagttgacattctttgtgatcctattttatgtcattcgaaaatgttaatgttggaaacagatgatataaacaggttgtctaggaagctagaagagacaaaaataattgaaatacagaatttactttgcctgatccgcagttacataactttttccagtgtgtctcattagtgaatccatttgaagaaatgtgtagcaaacaatgtgagatacacaagtgatgcttttgtgaatttgactctgaaacagtcatcaactgtctgggctcaaagcaggacaactggataattggtgggaaaattagttgactaaaatgtgcgatgttatcagtggacttctctttgcagggaagagtaagtgaagccatttgatttcttcacatgtggtataaatatctgaatctttatgaatattctggattttctttgtttcattttttattttctatgaaatttctgtatcttttgggcaaatagcacatgaattaacattttctggtagaaacatgggtaccctttgtatttgtatgagaaacactggcagcttctccacctggctggcaccccatgctctgctgtaatatccctcccacatcagtttccttcctaagcagtatcttcccgtgtggcccacgtgtctcagcagcattacccgttagccaggaagggcccaccagaaggcagcccagggcccactaccctcagggtcctctcccgtggcctcttggagcacaggcacctggagtgtcaggagtccttgcagcccaaagggctgtctccgtccttgtctcctggacctgtagagattcctagggctgatactaccagcctaatgttttaaaaaacgtttttctgaaatcatatcttgcagtcctgtctgaatcttctgtccgaaaagttattcccgagacataggtcaccgtgtgtgtgggtgggtggactgtggcccaggggacgcatgtgaggagctgggccctctccttcactccctgacagtgtcaggtctgctgctgccagctggtagcacagtggagacacaacagcatgagggggagggagggtcgcctttgaaggggcatttggcccactttaacaacagccgcaggtgtgccagccatggcttgtgactgaattttaagtgctacatttgatcctaagatcctgcagttaccctcattttccattatcggtgtggcaagtgtctcctgaagcttgtgccaggtgacagagcagcacttggttgctttcccaggacgtcatcttatcttcttatgcccgcgaggatgaaggagcagtgtcttgattttgttcagtccctgaatttccagtttcccaggggttccattctgaggagtggagcaggttttgcagacgcacaaggggcagcacctggccagtgagctccaggcctggttcctgttgcacgctgctgtggaaataacagtggtgccctcgcgtgtcaggaacgtcttatgagacatcttaagctttggcatcatccttaaccttgttctgctcaggggagcctaagcgtgcagtaaaatgctggtgaagccattcatttttttttttttttttttttttgagacggagtctcgctctgtcgcccaggctggagtgcagtggtgcaatctcggctcactgcaagctccaccaccaggcttcacaccattctcctgcctcagcctcccgagtagctgggactataggcgcctgccaccacgcccggctaattttttgtatttttagtagagacggggtttcaccatgttaaccaggttggtctcgatctcctgacctcgtgatccacccgcctccgcctcccaaagtgctgggattacaggcgtgagccacggcacccggctgaagccattctttaaaatcccgtcttcataaaacattcgtattgtactgagctttcctgtgacagtgaggctgcacagcaagtgcctttcttatgatctgacaaacttttaggaacaagcaaaaggcgggccagaagaaagacccagcaagcggaagcactgtagtttccatagttagcgagcgtgtctccaacatgagtgtcccttcttcatggagaaatgtttctcatggtaccgcttgcaggtgcttgtgttctgtgatagattatagccttctgatttgcatctggcataatttttcaaaaatataaatggtacacgttgtaccatataatcttcaagaaaatattttctttaagaaaagattttctcccttgcatcattaaatacaatttgattctcttcctcaccttttaaaatgagtattttgatttcctaatttctaaagtacatattttgcaacatttattgagggcctttcccatataagctcttgtgtaggtgttggttaaatgacagaaatgttctgacattgtgagcagtttgctttcatttagaaaaatgtttatattttaggaaatataaagttttcataaaggaccaaataatgttattttttctaaaccatgtgctatgatgctgtaatatcttgattattaaatgttgctgtagagtaaaatgtttttattgccagatctttgatgtataaacactcactgtatatgttctgattggtctcatatgtctttgctgaaactcttggaataatggctcaaaatgggatgaatatccagagcagtacagtcacaacctttaacttcctccctgttgaaaatgctggggtttcaacaatccgtaattccgatttgaaaagggctacagtttccttccctctctggctttggtcatgaggaggcctgggctcggtagacagaggtgaagagaactggtaaaagatgccctcctctagcttgcctggatgaacgtttttaaatgcataattgctagaacttaatatttaagtgacatggtatagtcaagttgtttttcttcattctgccatggtattcgcctgaggtttatttattattttttcatgatcctaggttcacgcaaagaatctgctccacaagttttgcttccagaagaagagaaaattatagtggaagaaactaaaagtaatggtcagacagtgatagaagaaaagtaagatgtcttccggtattctaaagcagatgtttgacctctgcggtggggtagtagagtccagacaactccctgagggcgggggtatggcttcagaagcttcactttttttttttttgagacggagtgtcactcttgtcacccaggctggagtgcaatggtgcgatctcagctcactgcaacctccaccttccgggttcaagcggttctcctgcctcagcctcccgagtagctgggattacaggcctgtgccaccacgcctggctaatttttgtatttttagtagaaacgagttttcaccctgttggccaggctggtctcaaactcctgacctcaggtgatctgcccgcctcggcctcccaaaatgctgggattacaggtgtgagccactgtgcctggccagagcttcacttttaaaatgtcttcataggctgaagttgcccttgactaggcttgaacctgccatgcacagaggttggcagtttttagttgtgaatgtagacagtacatgggtaaggcagagcagctccgtgtcctcctctcagcatcgtagtgtctcctggtaagttttcgtgtgtcctctccatgcctcaccttgttcatgtgtgtgtgttctgtttcctgtttcaggagtcttgtggataccgtatatgcattaaaggatgaagttcaagaattaagacaggtacgtcataatccatctttaaatcttttttttcttttcaaatgggagaaaagaagaaaattacattaaaaataagctggctgggtacggtggctcacacctataatcccagcactttagaaggccgaggtggacagatcacctgaggtcaggagttcaagaccaacctcaccaacatggcaaaaacccatctctactgaaaatacgaaaattagctgggcatagcggcaggtgcctgtaacccagctacttgggaggctgaggcaggagaattgcttgaacctaggaggcggaggttgctgtgagccgagattgtgccactgcactccagtctgagccacagagcaagactccgtctcaaataaaaataaaaagctgattgtccataagcaaaaaactaaaaggaggtcatgtctttgagaagtccagcagataaaataattggttgtctctaaagtgacttgtttaaactcttttttttttcttaacaatactgattttgatgtcataaaacatcgcaaattctgttggaagaataatttaaaatatcgaaagttctgtctggtgacaaatcctgcgaggcgcccctgagattagcctctgccactgcatggtccttggctcccgaagccaggttagcgagccagaagtggcgactaaccaagggtgttctgggtattgcacggaatgtgagtatgagcagctttggtcctctgcccagctaggcgagggaaggttggggtgttcattgcacggaatgtgagtacgagcggctttggtcctctgcccagctaggtgagggaaggttggggtgttcttttggccgaggaacagcctgagaagagttgtggtctgggatagagagctgagagcaggttgctgtgtggaactggacatgtgctgtcattctaagcagtgtccgcaggtcttccaggtacacctttgcctggctggcaggcttccatgttcacgctttgcccctaccggcagcaggcatctgtttgtgcatgcctcctacgtccgagacatgcctgggttcagctgcacagagcaggtgctcgcccacttgctcctgcacctgtcagtggctgttacttccagtcctttctgtaactctggaaggtggttataaatggacaaaaaggctggataggagctgtctcgtccgcagtttccagctattttcttacggtatgttctatagagattcattcatggacttaataagagccattaggaccatttccatcccgggaacagcagcacagtcaggagcaccgctgccaccctgtccaggtgtttgaccttcgtggatccccacgacctcagagcccataggcagctcacgtgggatttcatgaatcgaggccttagctcctcaaggatacacatttggggaaaggaagccctacgcgatgccaaagatagtgaacaccctgtggtctgcttaatttacaggacaacaaaaagatgaagaaatctctagaggaagaacagagagcccgcaaagacctggagaagctggtgaggaaagtcctgaagaacatgaatgatcctgcctgggatgagaccaatctataagggatgtcctcagttctttctgttgaagaccagttctgaggtgaagctgggcacccctgacccaagtcggggtgcactcaggaccacagggcagggctgggtggggcgccaccttgctctctgtatatagaaaagctggagcttattctgcgaatggagacgatcaaaccatgactgatgaatccagacaggagggattgactctgaggacctgagctacatcaatccactctgtgaacatctcagttacctcattctgcaataagttcagtgactgactaaaagtcttgtttttccagactttgaattgaatatataaatattatatatacatgtttcttgtaaatatcccattttgaatgcatacctgtggtggttctgtccgggctaatccccatgctagaatgtcctttccagctacgtgaataagaagtcccatgcccgcatccaccggaagcagaagcctggtggatgcctggttcgttccgcagcaccagggcctccaccgtgctgtggcagcaccccccatgtcggtatttctaaataaccttatttatacctgcagagatacacttcagtcccattcagaagtcttctcttaaagcagcattacagtcccagacctgcgggtttctgagggcaacttgctggctgacagactcagtcttgacctcaaggaaggcccatacggcactgccgcatccacctagaggtgtttgctcttgtccgctgtctgagtactgtgattctcagatgagtttgctgcgttttgggaggacacagacggttctgtataggctagttcagtaacaacaaaatacactgttttgtcttccctcaaagagagatcttactagaacctgtaaatagaatgtattatttattataagtcactgcagctgatgaaaacagatggaggccatgctgcaggctgatactgatgggtggagttttgtcatcaggccagcctcatcccgaggtctcctccaccattggccgtagccagcaggcttcagtgctcaccgaaagtaaaatcccctccttcagcaagaataaagcaatatacaccttaggttccactaagtaacataggcataagcagggaacgtttcccccactgtgttccagtgcagaggagacgaagcctgtcctcaccgcggctcgctgggcccaggctggctctggaaagcctgtgcggtcctgggcaggaagcccggcccgtggagcaggttttcgttctgcttcagcaataaataagggtgaccacagggactttgcttttggtttcctttcctgtgaaaaggttggttttaaagtgagatacacttttccgtagaacaagtgttctatctttaaaaacccaaattgcagcaccgtggattactggtctcagaacaactcattgcgcatcagatttgactctctgattttctgtctattggccaaattgccctttaactgcacctgaatcctttgtgtactgatgcctttgagctgggcaccttgggagagtgttgtgttgctgtttacggttcttccttgcccttgctaattacagtctctggtgcccagcaagcccctttggcttccttccgtgactggtcacgttgtctgcctgggctcagcgtggacctgccccatgctgcagaacctggcctcacctggacttttcactagaattgccagcttcctcaacttagcagatcattcactcatgcgggcacaagcaaagatcaacactttcttttttggtaagcttgagttttacaagttattttttggtgatgcgtaagacattgcagtgggaaaccattcaacttgagtttattggagtttgctgttgtagcaggttttaactcaggaacaactcttgtctgatctctccgcccctctgccgggaggcgacattaactgtcctctcggagccggtagcgttgctgtccgagtccccaggacggatctcctgcagacctgccttaatgctcagatcgaagtatttcacaagaatacttgtgtttttaacagcccttcccctggacggtgcggccatgagggcctcatgttacggcattgccttttctttctgtggatccagtatcttcctcggctttttagggagcaggaaaaatgcgtctgagagcaactctttttaaaaacctgccctgttgtatataactgtgtctgtttcaccgtgtgacctcccaagggggtgggaacttgatataaacgtttaaaggggccacgatttgcccgagggttactcctttgctctcaccttgtatggatgaggagatgaagccatttcttatcctgtagatgtgaagcactttcagttttcagcgatgttggaatgtagcatcagaagctcgttccttcacactcagtggcgtctgtgcttgtccacatgcgctgggcgtctgggaccttgaatgcctgccctggttgtgtggactccttaatgccaatcatttcttcacttctctgggacacccagggcgcctgttgacaagtgtggagaaactcctaatttaaatgtcacagacaatgtcctagtgttgactactacaatgttgatgctacactgttgtaattattaaactgattatttttcttatgtcacagaatgtgtcgcttcgtcttctttgatgtgttttctgtgtgcttgttagctttacagtttctttgggctgttttagatttgaaaattctgtctgtctttgatactgaagataacatgtttcctttaaagtctagagtttgagaaaatttgaagatttttttttaaaagacaaggaaagaacactggaagtcttaggaacaaaagctgaagtaacaggtcacgctggtaggcacagcccccaggtcctcacccatgcctggaggaatgacctgcattctggaaggcgctcaggacaccgttttgtgggatcaagtaagcgaaactttcttgaagatatctgtggggtcccttttaggagctgtcataagacaaaaggaaattgctcgtgtgtgtccctgtgtggcggtggtgcaaacgagggtgtcttccggaagggtggccgggaggaccaagcggggtctcctgtccatggtccgtgtacctggctcaggtgtgtctacagctccgctgcatgtcatttcagccagccagaggtcaggtagccacacgcagtgcccagcccactggcttattgtaggagctcaaaagaagtcaggatctacactttcaaggactttagtcatttcaggttaaaacaagtaggcgttcaaaaacccatttctgttgatttgcattgtgacaagaacgtgcgatgcataagacacctaatgtgaattgttcatcttactggtggagtaggtaggcatttgtacttgatacctcaccagtaattaaaaactaggatgtacctgagccatgtataccgttttttaactgtacactttttaaaggtatactgggccatgtatacttcattttcttgcagaactatttatatttttcccataagcaggtattattttcctaattaaaaactagcatgtaccagagtttttaattgttaaaataatacctgttgatacggaaaatagaaacagtataccaggatacaaagtaaaaagcatgtattctgcctcccagcgccctgaccctgttccccagaagtagctcctgttctgcgtttaggttcttctgttcattcttctgagcaaatgccagtgtgtggtgtctgtgttttaacttttttcccagcaagtgagattgcattaagtatattctttcctaagttgcctctttgaaccttatctttccatatgggtatatgtagtttgaaccattcatcatttttgaccactgcataaatattcccctgattgagtgccctgcagtttgtcacctatgagtggatatttgggagggggcagtcgctattgcagaaatgctctactgaatatccttatgtatacagctgtgcaactgtgcacatacagctaaatgattaacttctggaaacgtttgtgcatttttaactttgatagaatttgccatatttttacaaggtgttttggaaatgacagccttggcaattgtacagttctagtttctcaaagaaggaatgggg

SEQ ID NO: 42 - DNA, 46360 bp, Homo sapiens
  source 1..46360: mol_type = genomic DNA
cttaaccagctactaattggcttgctaagcttggaggatacacattgaatactaattttaaaactgttatggtgaaaacaacaactctcctatttcatgcagatataaaagatagccagctattgttattttataacactactgattttaaactttaaaatgctctatccaattaactcaggtgagagtcggtcttacaaaacacaaacagtatggctacccaggcacaattcactcctaacaaacttatttcctaacataacctttaagacaggtaaaattccttctgccaaaaatacattttcaaagactgaggttctgtcactcacggacactaaatgcaaacaactaattcatcctttttaacgcagtttaaaaagacaactactttctttaccgatgagtccattgttctatgttttaaattaaaaccacctaattatctcctgccaattgtcccaacagttccccctgcagaccaccccgacgactaatgaaaacaaattttggcagccgctgttaaagtcttacagtatcaagcccctgcctccccctcccagctaaaatcgggcctaaagctccaagacgctcaccccgcccaagagccagcaccttcaccacgcatctgtctaggccaagcccacggggaacttccagggtctcacatccttctctttgtgcatttccaccctccacttctctccctcagaacatatcccaccatctcgagttcttccttcgtccactcttatcttcttctcctttcggagaaagcttcctgtttctcactccgtttttcattgtgccgccttccccctgccccactgatcccttaccgagggccgtctcctcaggaagccgtcagcagagacccaagagccggagcagaggcttgagccggacaatctccgctccccgtccccaggaccctgcgagggaggatggctctccatttcactcaccatgaggcctccacgctcagctcccgtccccggcctcatcgtcgggctcagactgctccgccggcggccactgccgctacacataccaacaagaagcgatctgagtggctggcgcccactggggctaaaggttaaaggctgccctgcgctacggggcgggatcagcggggccaacaggctgacgggcttccccgctgtccaatcagaatgcgccgccgacacgcagctctgcggcgattcgcccccagcctcagcctcactcggcgtcgcctgcatgggggggggggaggaggaggacggaggaagtttctgcgccgagtcctccgtcgggaaaactctaccaacttccccaggggaagggaagacaacagtgtcccagcttcccgagcttagaccgcctcaccccgtagggggtggggcagtgggggtctgccaccttcaccctccccgcccgagttacgtacgccccacaaacctgaggccgccaggggtagggtggagggggcgggggtaagcagcctgtagtgttagcggtggctgggaccgaatgcgcgcgcgcggtgctcgaggcggaggggaggaggcggggaaggcgaaaggaggggttcggaggagagggttcgatctccgtacgcaccaggtggagagcgcgcgcctggggaaggaggcgtgtcgagtagcgggagggaagttgtagtacgggtggggagaaccacactaaagggagatgggggtgagcagttaaggaaccgcgagagcgccaggtagagaggtgcccttaatgggggaacctggagaagagtgtgagcgtagtggggaagaagggagaagacaaataggttcgggaatgtgtctccgagggcgcgagcgggcgctaggacccggcgtcgaaaagatgaggctttggggctgtcggggcgcgcgctcccgttggtgacgcgggggtggcggaggtctccggccgggacgaagccccgcagggagtggatactcgacagccttcggcctccgctcgcttctccctgcgcgctttcctgctcccctttccggctacagccctggggtcgagctctggtcgaagcgcattccgcctctcctttggccctgcggcttcctttgcaacccgccgcccacccttgctctccgtggtttacccctgggctctgaggcctggtggtagcggccactgccgcggattggctgttgcggacccggggcggggcaggtgggagaggctcgttctccgcgggtttcgttgtgtttcgcgccatgtcgtttgctgagagcgggtggcggtcggctctgcggcgccgcggtcccggcaccccgggccctgtggctcggccatcgtattcctcctttactcagggggacagctggggtgaaggcgaagtcgacgaggaggagggatgcgaccaagtggcccgcgacctgcgggcggagttctcggctggggcgtggtcagagcccagaaagcgctcggtgctcccgccggacgggaacgggtcgcccgttctgcccgataagcgcaatggtatctttcccgcggccgcgggcagcagagcccagcctcggcggtggccggtccaggtcctctctattctctgctcgctgctcttcgccattcttctcgccttcctcctcgccatcgcctacttgatcgttaaaggtattgaagccgacgccttgaaagtctgtccagagtaaagttgagccagggtgtggctctcgtctccacccatctccctttccctcgcgctaagccctcaggctggcagctgctttcacccagagtcctcatttgcatcttactttgctctcccgccctttgccttttctaagtggagcgtcctgatccatgatcaggagacgtatttttaaaaaggatcgtttgattaaatgggtactcttgaagaaatatcttcaagtccttgaacactggggatgaaatattgtgaagattaaacaaaatgcgaaacacccaccattaaaaggagacagtgaaaagtgcatataattaaaataggccatgttcaatggccttcatccacaaataaagatgtgctgtccaccaattcctctacacagaatcttgagggacaaagattttcatcgcatagtccaaatttcttcttttataggtaaaataattagcctctcagtttttaagtttgtatccaggtgtagtgcacggagttctgttgcagaaagtatagtccactcgtcctctaataattttgtttttctgtctgaagttgaaatattggccggttgaagtttattgcaaggcatacggttgtataatttagttggctagtgtatattatagtggaaagaagcagagttaagtttaaatttccattctcactagtttgtgacctttgccaagttactgaaaaaaaaaaaaaaaaaaaaaaaacaaaagaactttgttgtatgaaaagcacccaaaacattgtcactgaagtgttatttttgtacttcattaaatataattaaatctatttaactccagtttttatttgtcctcattgcttcccagcgtttagtgggctacagatggcatggcatctaaaaccttacaatgcttgattttcatacagaagacactttggccagttgatgtgggttttacctcttcataaaatggtaaactgaatgtgcataaaatgcaagctgtcagtcttaaatgattggctgccaatgtttcatttatcattcccctccccacttttttgcccttttttgcaattctgatagttttgtctcctaggtggtttatttctgttttgctcggagacattgcctttgtatcataaagtcacaaaaccatgataagtggaattccattgcagaagacattgaactgtgcttatttggaagaatagagaaaggaactgaactccacctagtatgccctttagtgtttaccactaccttagggaataaacagtactctcatcctatgtacggtatatagctgttggctcccttagtggtcaacacattaatttgcttgctgaaggtcacatagctggtaaattgaatcagaatttgaacccagttctttgtgactccagagcactttccacagctccacaatgccttcacagcccttgagttacttttcaaattatagtattgctttcctacctaagtccctctttgtatttgcagagttgcatgctgagaatttgaaaaatgaagatgatgtagacactggactattaggtatggacttaattgccgcttgctttggttttgagctcacgtttgtgtttctagatcatgtttgaactaactctgggataaaatacttaatgtatttctatgtgcagtcattcagtcttgtttttaatttgcatatgttggtgataaatgttattagatttcctttatatgtgtggagtatgtgtatgcatatatggtatgtttgctataattttttaatggggccaggtgcagtggctcacatctgtaatcccaacactttgggaagctgaggcagtagaatcacttgagcccaggagttccagaccagtctgggcaacatagtgagaccctgtctctacaaaaaataaacagaattagccaggcatggtttcactcatgtttgtagtcccagctacttgggaggctgatgtgggaggatcacttaagctgggaagttcaaggctgcagtgaaccgtgatagttacactgcactccagcctgggcgacagagtgagaccctgtctgaaacaataataatttttttaatgggtactggtatgtgtatgtaccacacacactagtaatacattttaaacacaactgcatgtgactcaggtccagagaaatatttaacattttctaattaccttctggaagaggcttcccacagctcttctcaggaatttaaaaacaaaagaacttcctcactatcctagcaaaggtaaataatgtcttatgtaggcttcaggaggaatttaagttcaaatatctttatgtgcagctttttttttttttaaagcattgaccatccttgcacaggtaaatgactaggagagtcagacctcagtttctgcagtgtctgtagaatgctgtagttcacaggtttccagtgaaaaaggttattctatatttctctccaccaaaatgattctgaagagttgaaaactttacctgtccagcatattttactcctatttgctttgatcactctaaattggggaggggagatcaaacttaatcactctacattcgatcacatgaatcaagtcatttgatgtgatcactttaaattaaatcatttgatttgatcactgtagataggtggttgagacactatgacacatgtcctcccctctcccattctttcctaaactctctaatctaccactttatggctaatcacccttatggtgacactaagtatagtgtaccttatttcagcagaaggggaaacatgaaccctttatcttcaaattgcaaagaagttggtttcttagatattgcatggaaacttttgtctgttcttgtcaacatcttgcatgagaaaacatactttttagttactcattttatcagtgtatgtttttacattgttttatctctagaaataagccaagattattaggcttctcagagcttttattgatctgtcacctcttgatgcagtggaaacagaatcttatgaattaggcatgaattctaaaccttttgctgtttaaaagttgtcctgatttctcatttaggagtagaatgacgggcagttgttatctgaaggaatggcttgctcaatatcaaaaggaatgtgataggtcttttgacatggtcctgcttccttttccacttagggttaaataatcccatgttgcttttaggtatgcatgatagatacttaatatttttacagcaaataggaaaatcattaagattttgctaatggcatgaatttattgtcaagagtcaggaatgagcagaaagtgttgtatctttatggtgaaaaaaacccaacagctatgccaaaacaaagctcattattttgaaccaatggtcagatgagctccagtggtcagatggagaataaaaatagttaatatcatttaatgggctaattcaatcagtttcctgggggttaattttaaagaatagttatagcagatgtatgtattataacatatggatagagaatagttgtctctaccagaagaggattcttaaaaatctgtttcagtgaaacagggccaagatgattaagctcttaataagattgaggtgatcggccacgcgcggtggctcacacgtataatcccaacactttgggaggccgaggcgggtggatcacttgaggtcaggagttcgagaccagcctgaacaacatggtgaaaccccgcctttactaaaaatacaaaaacaaaattagctgggcatggtggcacaggcctgtaatcccacctactcgggaggctgaggcaggagaatcacttgaaccggggaggtggaggttgcagtgagccaagattgcgccactgcattccatcctcagcaacagagcaagactccaactcaaaacaaaacaaaagattgaggtaattgtggcaacacctgcctttttttctaagctgcaattctctactgttttcaagaaaaatacaagttagcctatttacagaatgttttgaattgactcctgtcctctggttaaaactcctcttgagataattgatagctgaaaaggtaggatggttctctcaaacttgacttccatctaaatcaacgctgagttgattaacttagatatcaagaaaaattgcctcattagtttacccctgaggagatgcctatgaagttacatcctttttacaattaataagacagttttcacatgaagaaacaatttgaaatatttaataagaaaatgtgttgaagtcatccattacgtttgggaaaagtaccatgcagccttttatcagatgataacgattttattatatttcactatttattttgccctgtttattaggaacctcgtagccaaatgtaataatgtttgattgttttgtatattactctttatttcttggcatacttattattgcccacacatgctattatcttaatatttccgtgactcatatttaaaatttactgcaaatttcctcattctttgtttgaaagtaggttggtttttagaaaaagcaacgtgagcacagtaactgctctaccatgaaagagttctctttctttttctagacagactgacaaaaattttgtacactgcagaatttaattgcaatttaatcctagtccaagattggcatggcagtcagtaagaacagattatagcagcaattctcattttggtatgggtaacaatcacttggggacttgcttttttaaaagcacctgtagattttgttttggccatcatgatttcgtgatacagaacattagaagtgttaaaaaaagtccaagagaaaggatgtgtgggaggtggcccattctcttaaaaagacacaagttgagtaaaactcagtttcatccttacaatgaaaattgattgaaactctgaacttgaactttttagccagtgtgtggactttataatttgaacctatactctattaagaaagtgttacagtgctatctgtggctgggtggggtagctctaatatttcatctaaaaagtcacaaatatcctattctatagcacaatttttgtaaaattgtcttacctatttgtattattcaagaaatgatgactaaggccaaaaaaaaaaaaaaaaaagagagaaagccaaaaaggactggaaggatataatcaaaatgttagtttatctgggtttccgaattgattggttgtatttattatttttattttctacaatgtataagtgtaacttgcaataagaaaaactttaagggaaagcacaaatttaagtttagagaataatgtttcagtaattaacaataacaccatttattgcacttttacaatatgccaaaagccattaatttgtgtgttatttcctctagtattctcaactacactgtatccatcaatgttattttcttctaaaccaaaactcaagaaagtatgtattataatttttataccatagatagtctaggtagtatagcaaggcagaaaaagaatgggttatcagcaagaattagccatgtgcagctaaattattagtcatgaaattattacaggactcttcttaacacataaaagcagtaataagaaccagacattaggacccctaaatctcaataaattgagttgacattgtgtggtactctgtagtccaactttggtggttgggagggacgtttcttaggctaatgaagtcaaaagttagctggcatcagaatcacctgaaagataaattttgctgctcttcacatggtgcagaatatctgactcagtagtgtgagatggagcccaagaattttcatttttgacaagttttgagttgatgctctgcatgctgctagttagggggctatatatactttgaacaccactggcctagtagttcccaaacctgacataaaaaaaaaagcaaaaaaacgaagaccctggagattttctttttttgcttttacggaatcttagaccctataattatctactgaatcgaagtaacttaattggctgtatgtgtcagtgtacactgtacaatcagggctcattggaccatttttcatttctgaattatttcgagcagttctgtttgtaaggattgaaatttcatgacttattctttcttagggatcttcaaaagaataaagaaaactgagctatatttctcataaagtttatttgatcttgaaattaccacattggtctattggacattttttaattttgaaatacgttttgggattttagtggtcacatattgttctttctcaaaacattctcctatttcattattttagtattactcatcaattctcaactatggtcgaaagaataaaataattatgatggaattaggattccagtaagactttcctaagactttaagtatttttttcatcttttatgaggtctgcatcctaatttatttgatactgtttgtaagtggacagatgctaagggcagatgtgtatacaaaggtgatttggaaaaaaaaatgcaaaaaagaattattgggttgaccatttgaattgtttgtaatctaaaaatgaaaatatgttacaaattatggagcaaagaagattgttgtcctcttttcgtcaaaataagccatgaaaggcttaaaaattccttcaaacattgtgttttaatgacgcaagtgcaaaaaaaaaaagcaggaataatgacaagctgtaaccaatttgagatgtatctgaaatctggaagtggtatttacaagatggatatgttgtagattcatacatgaagttagtaagcaattatttgcactcaggtcgtgcccatttttggtgtacatgactttagggaaactgggaattgaaattcggatttgctgtatttatttcttatgaaaatttttaacaaagtttttttcctgctgtctttttgctctctaaattattcttcaagtgtcatgaaaataaaggaaataaaaaagcctctttggacttatatgataaaaatattgatgactgttttccctgttatactgaagattacaagcttcagaggagaatataaatttaacaggattgcccatgaattaattgtttaaagctggatgatgggtatatgagttttatatacttctctcaactttttcctgtgtttgaaatgatctgtaataaaagtgttgggttttttttttaattttcccatgtgaatctaatgatttaccaatgttgggaactacaggtgttatttatttttgaaatttcagtcacttaatctgtcagaggatcaccttcctcatctgtttcaacagaaagatgtagaaatgctacagtctgggttgcaggtggtcgggcgattgggtgaaggccttaaccagtgtaactgctatagctaccatgcactctgcacccactatgctcatgttgcattggcaggagaggagagagcactttcctctgctcctgcacttggctttgacgtgtaaagagacactttgctctagggatttaaagacttgagctatctatagaatgtgatttagagaggataccaaattatttaaaataatggtcatcctctcaagttagaaaactatagaatctaataaagttgagaacatttgcttacataaacatttaaaaattgatggttagtttcatgcatatgatacatctaagttttattagtagccagctggtaatagtttttacaacttttaaagttagctaagtacagccatacaccacataccattttggtcaacagtggtctgcatatatgcctgtatgatggtggtcccataagattacagtggagctgaaaaattcctatttagtggcattgcaactgtcctaacttggtagtacaatatattgctcacatgttggtgttgatgctggtataaaccaacctattaccaatctagttttatataaccttccagtcataaaaaaaaatacagcacaattacgtgcagtacataacataattcttgataaacaattatgttactggtttatgtatttactatgcttcttattgttttagattatattacttctgcttaaaaaaagttgactgtaaaacagcctcaggcaggtccttcaggaggtatcccagaagaaggcattgttgtcataggagatgacagtttcatgcatgttgttgcccttgaagacctttcagtggaaaaagatgtgacagtgaaaaacagtgatattaccttgaccctatgtaggcctaggctaatgtgtgtgtgtcttagatttcaacaaagaagtttaaaaactaaaaaattagaaatagaagcttatagagtaatggtataaagaaaaaacatttttgcacagctgtacagtgtccttttgttttaaactgttagtagaaaagggtaaagttaaattttaaaatttataaagtaagaaagttacagtaagctaaggttaatttattaatgaagagaaaaattttttaatttagcgtaacctaagtgtacagtgtttataatagtctattgtagtggacagtagtgtccttggccttcaccttcactcatcagtcactcgctcactgattgacccagagcaactctttgtcctgtaagctccattcattgtaagtaccctatacaggtgtaccatattttatcttttacactgtatttttactgtaccttttctatatttaagtatgttcagatacacaagtacttattgttgtattacagtcgcgtgcagtatttggtatagtaacatgccgcacaggtctgtagcattggaataataggatataactgtatagctcataggtgtgtagtaggctatatacctaggtttttgtaagtacgctcttgtgatgtacaaacaacaacgaaatcacctaatgatgcatttctcagaacatatccctgtcatcagtgtatgattgtattgtattttcattgttagtatcataaaatgcattagttacgtaagtaatttaatctcaccaggaaagattccaacaattaaagcaaaggctttcaccgatctacctgtgtgtctttttacatctttttctctttgtttacatatgtatagtcatttaaaatacatgtttttttcactgttataggaaaaatataattggaatcatgtatattttgcagccttgttaaagtgccttttggagtatattctgtattagtatacataggtctacctcattttttcatgactgcattgtatttcataatataagtataccagtttatttaaacatttcaaatgtcagaatctcttacccaggacttggaaattactagtatacagtcacgtttaatcccattgtttacttatgaagttttatgaagtgtgtgcaattgattgcctaacacttatttaataggaaacctttccctagtataggaaccatgagagttttgtttttttctggtgtattctgattatatataatatgtgtaaattggtgcctctgtgtctgacttcataaaacttcttgaaagttgcctcatccccgtaagctaaaactgttaaacaaaatgaaaatatttagagcatataacagcctcttttgctggaaggttttatagaaataaagttgccagcatatttttagaagagtaactgctccctgacaccagaatggcttattttgaaaaataagccaaaacaaatatacccttagataggtgtctataatattccagcaaagggattgggataggaaattcctacccatccctgtttttgctttggatgaaaacagtcttaagaggtttcaattgatggaaaagattagtatacatcatttcattggccagacgtggtggcgtctgactgaaatcccagaactttgagagccccaggcaggcggatcatgaggtcaagagatcaagaccagcctggccaacatggtgaaacctcgtctctactaaaagtacagaaattagctgaatgtggtggtgcacacctgtagtccagctactctggaggctgaggcaggagaactgcttgaacctgggaggcggaggttgcagtgagccgagattgcgccactgcactcagcctggcaacacagcaagattccttctcaaaaaaaaaaaaaaaaattaatatacatcactttggctgggcacagttgctcacgcctgtaatcccagaactttgggaggctgaggcgggtggaacatgaagtcaggagttcaagaccagcctagtcaagatggtgaaaccctgtgtctactaaaaatacaagaattagctgggtgtggtggcaggcgcctgtaatcccagctacttgggaggctgtgccagagaattgcttgaacctgggaggtggaggttgcctgggtggcagagccagactttgtctgtgtgtgtgtgtgtgtgtgtgtgtgtacacacatatatgcacacacatcatttcatcaactgatgaatattgagctgtagagaagaacgaaggatgtgtgtatttatttaaaagcctgcaacctttggtagcagttattctggaaatttgtaacatctatgtccttgtacaactgtacccttaaatacaagaatgttccttggagcattgtttgtaatagagaaaagctagaattaaaaaaaaacacacacacaacagaactgtggctgtgggtgctgataggaaaggtctccagaatatgtgaaaaaagcaaaatgcagaaccatttttctggtgagaatctcacttgtggaaaataagctgagaagatatatatacgttttatatataactagctttatatatgtacctgtattacctagatatgtatataatttttggaaagatgcacaccagactcttagctgatcacttttaggaatgaaattggcaaactgaggaaggaagaatttcatttaatatgctttcatttttatattctttttaaagttgttaattctttctaagggcttataaaacatcaaaattttagcatgaggattctgcaggtactgacttgtaaaaaatttagttgttggggagttaccattttctgtggcttttctgcttatttgcaaatgaattaggtaatttcccgaatcataaacacttctagaccacaatattgcaatgtactttttttacccctatcattgtgacctgacttacccatgatgcagcttctgattagtttaaaatgaacataaaataataaaaatgctcaatgcgaagtaagtacttagattgtggaatagtaattttggaaaaactcaagaatattcttgtattaaatttgacaggtaccctattaaagcactcaagtgaaaaagttcaacaggctttagaaagcctcacatttgattatttttatgttactttgtgtctttcctcacttatctagaagtttcatcgttctatagcagtccccaaacactttatttttcttaactatcatctttgttctggagaagtatgttaaactttgagtaaacttgtcaattattttctcccctctttagacatagtcatctaaataatagcaaataacagctatttggcagtatagcaacccctaagttgtagttgtagactaaatcttataattttttttttttaccctctatcctgatagattggtaggaaggttattctaaggttctgttcacccaattccaggttgggttgaggtgctagaggtggatactgtgccaggatattggggtgaaggtgcagactaatcctcaagacatttgctatagtgagtattgaagtatcttttattgtggtcaggatggtgtttcagatgtggcaacttccagccacatgaccatgtggtgtttctatgccaggcttagggcagaggcatctgcaggcttggctctgtacttacctaccaagatactgtacacagctatactccctgtgtggttttgcatgggcttttctagatgcttttgtcaggaagccccagtagcactactccctttccccatttacacacataagtgcaaacatgcatacaacctactttatttaaactaaggaaatctttctcacttgtcgataagcccctcactctctccctgttccacacaaacattttatctgtactccaatcaactcattgtctttgctgtgcattcaagacatattgtgtttatccacactcctatccctgattatatctgtacactggtttctgtaaatattgtgcaatgtaaagtagaaaaacaggctatttcttctttctgctttgccacatccctcttctggagaaatgaacacagagcccattagctctttaacaggtgggagatgggaggagggaactatcaggagatataatttaccacactttctattaataattcttctgagtctgtactttaacagttttttcagtctgttactgagcttcacaagatttacaaacagtccattgcatgtactttttacctgcttcttgctaaaataagactggtggataatttgtatagtcaggaaatttgataattcgtaagtcatctgctagggttctcaactcttcctgtattcttgaggcatggaacacactctcagaaacctgttttaaagacgcagtttaaaaatgagtccacaaagattctgatacgacctccttgctgctcctctgttcaaaaagtactacctgactgaatttttttattttttacaaatttacttagttctattttgaataggtagaatagtcatatgggtcaaaattcaaaaagtgtaaaagagtatagactgaaaaggcttactcttttctcccaaccactctttcctccctcctcagagaaccaatgttaaattcttacatccttccagaaattttttaaaatatctaagtacaatatacatttcttcatatatacaacatatgtatatatgtatgtgtataatacatattttccccttatttatacaaatgcatagagctgttctgaactttcagtttttcagctcaccagtatattttcaggatctttccatatcagtacctaaagagcttcctcattcatttttatagctgcatagtattctattgtatggatgtacttaattaaccaatcctttaccttcattactgataatttaggttgttttcaatctatgttattatgaacaaagctacagagaacaatcttgtatatacatcattttatacaggtttgtataatatacaaaggtatatatatataaaattgtatattataatatacagagatatattgtcctaaagacatataaagttactggagtaaagaacatatatgtgcatcattttaacagatactgccaaactgctctccatagaaattaaaacaatttactctccaaaacagccatgcatgaagagtttctgtttattcacagcctcagcatcagagaatgttatccaactttttgatttttgtcagttgatgaaaaaatgatacctaatttctctgattattaatggtattgaattgagcatctgttcatgttttaacatttgtagtttttattctgcaattgcatttaactttatatttggattttggattgctggtctttttttttattggcttctaggaattatctgtattagcaggaaattttcccttatgctgtaagttgcaaaggtatgttttatttaaaaattttttgtcattcaatttgacattttattttgctatgcatatatagtaatatgtgtgtttacctatatacagttgtccctcagtatccatgaggaattggttccaggaccccctctggataccaaaatctggatcctcaagtcctttatatgaaattggatagtatttgtatatgacctatgcacatcctcccatttactctctctaatacctaatataatgtaaatgttatgtaaatagttgttatactgtattggttttgattggcattatttttattgttgtattgttactttttttttttccaaatatttttcatccaaggttggttgaattccagatacggaacttgtggataggaagggctgactgtatatagttgaaattctgtgtcttatatgagtcttgaatttttgtatcatggttagaaaggtctttatctctccaaggctataaatgacttttccagtttttccaatgattgcttctacaactttatatttagattatttggtacgttttagaatttagtctggtatagggtatctggtatggatctaacttcttttcctttttgtaagtggtcaccccattgaattagtaacattttttattaatctatttgggccttcttccgaatcttgtgttctgcttcgttctgttgtttgtttgtttgtttgtttttgagaaagagtctcactctgtcacccaggctggagtgcagtggtgctgtctttgctcactgtaacctatgcctctggattcaagtgattctcctgcctcagtctcccaagtagctgggattacagtcatgcaccaccatgcccagctaatttttgtatttttagtagaggtggtttcaccgtgttggccagattggtctcaaactcttggcctcaagtaatcctcttgcttcagcctcccaaagtgctgggattactggcatgagccaccacgcccggccctgtcgtctatttgtatatcagtacacaccgttttaggtattcagttcctatactatttcaatatttggttggactagtctctatttttgcttattatttcatgtcaattttagaattaactattattcttccaagaaaaatatgcttacattttccatctgaattctgatgttacctccttaaagtggtaacatcttatttattcaaaatagttatcacaatatatagttatcttgttaatttacttacatgttttattatcttcctatcccactagaattacttcatgaagacagcaatcttttttattttgctcatccctatatccccattacctagcacaataaccaacacatagtagcccctcaatatagattgagtgggtgaataagtgagttaatttataaaatttttgaaaacttgacatcaaaataaagctgtacttcttactaaagggagttgaccacttaaatatcagtatttcctgtcttcctataaccacaagaagaagtcattatccttttattattattaatgggttatgaatagtatccaaaaacctttaaattagcttactcctttcttttccctttatgcctcctattcttctcaaccgtttttccttaagtccattataatattgttcttttgacttgacttctgtgagaaaatacagttccaaactcagtgcgaataaaatctaaggtcccacacatttgtaaatcaggagtcaacttttgttcatatactgagcaaggttaaagaatcagaataggtttataatgttcataagaaaactgtaaagaggggatacccccaaattgaggcaagtttcaaaagtgcatggcgtggaatgaaaggaatcacttagtactaaataataaagatagcaaggtatgatttatgaaattaaatgaaaaatctgatgaactttttttctttttcgaagcggggtttcactctgtctcccaggctggagtgcagtggtgcaatctaggcacactgcaacctcaaactcctggccccaaaccatcctcccacctcagtctcccaaaacactgtgattgcaggcatgagccaccttgtctggcctcaagacatcttaagagtcttgtgaaatgttttgaccatgttttctgtagttgaattttataaaactgaagatgttatgttcttgttgaatttacccttttttcccacgtattatcatttaattaaaatattcaatgatatgacttctagttgtgctttagtaatgtacacttatttctacataagttagcttgcaataagttcaaatctcttaaaatatcagatccatataatttagaagatgagaaatatacatgatctgaacatgagagtactggtttaatttaaattgttttggtgttaataatgtactttttcccctctcttttcctgttaaggattctggactctacttataatatccctaactgctggattctcctgttgcagcttttcttggacagtgacttactttgattcttttgaaccaggaatgtttcctcctactcctctttcacctgccaggttcaagtaagtattcctgtttcctgtttcttttttaaatgcatttcaactcttgaaaatactaaaatactcagaagcaagaggctgatcgtgaggtatgttgaggtttcagtctttataaagcactaataacaggacttttcagcttgtaggctcagcctttagatacatgagaataatatttaaaattctatatctagataatgcttttttttctaaaaactgaaattcaggggcttatttcacaagtaagaacctttgatggctatttgtccttttggaatagaatttgatttaaaacagtttataaaggcaaaattaataccaacaatttgaaagttttactaggttcacacatggtcagacttacaagaacataataattggattggacttttccttaggattttaactttgtgtaataattagcaaacatttatggtacccaatttatatgtctagaccagattggatgcttttcgtagtggaacagtattaaatttctttggtctatattttccatgtttcagagaattttagaaaattcagtagtgttctaacctagtttattcatgccaggaaagttccaattttaaatataaattccgaaataagaacatctaagatctctagtttattctggaaatttggggaggacatgaagacaagaaactaaattatattaaatttatgtatgttattctaatacttactattgttactaccaggtctagcctacctcatggacaggttgtagagataaaaacatttacttgagagactttataaaatcaaaattgtgctagtatagttattaataatcattggtactactggccttcattattagtaaactcccaattttttttgtctcatatcttttaaaattttggctcgacttcaaatgaaatgtgaatttgtatatatgtgtattatgtatatgtatacatttttagtgttttaatccctatgtgtatatgaaatgtaagtcatatgctttccaataaattttagttatgtgtttttgaggtggataaacaataatctaaattgactaagagttaagcctaacattacaatgccatcccgtagtttacatgggtaccactcaattagaagtttactttaataacaggtataagtctagggtaatgagactcgtttcaaaaaaatcaccaaaaaagtaatcgtattttttccttttatttatatctcacttccctgaattctagccacacatttcttgctgtttaatagaccttgctacccagatttcagaaagcattttgcacttagagtgattaaaactctgtctttgctttgaagccatcaatatccacccatttcactcaccagagcttgaaattcttattcattgtatttgtctattcaccaagtccagtccttcctgactttttaaatgtcattagaatgcttcctgtttgcattttcactgtttttgtactatttaaggctagtgtacttgacttcttggccttctgtcctctaagttctcactcttctaattcactctatatacagtcagccctctgtatccatgggctccacatccttgaattcagccaaccatggataaaaaatatttgggaaaaaaattacaatacaacaataaaaagtaatacaaataaaaaacagtatagacaactatttacacagcatttactttatattaggcattataagtaatctagagatgatttaaagtataggggaggatgtgcatacgttataggctaataccatgccattttatataagggacttgaacattcatggattttggtgtttgtgggaatcctggaaccaatctcccagtggataccaaggtgcaactgaactgctgtctttccattaacaaaaagagatacagtcacagccctctattggttaaaagccttcagtagctttcctgttgccttcagaataaagtccaactcttaagtatagcagaacagtccttccccaaatgaccctaccctacttttccaacctcagctatttccctactgcaccctatattgtagtcacataccagattagcttgacatccccctcataaactatgcaattttgagaagtcatgattttactcttgctgttctctctccctggattatcattttccctttcatgttgtcttttaccactgtcacgattcattaaccttataagtgtaagaagcctctggggttagagaaggttttagtattctgttaaagatctgctattctgagggcatttaactaattttaaaaaaaattatctttgcattttgtattaaattagaatcaatttaataaagggcctcaattttccatgtatttattaatgtattagtctgttctcatgctgtctaataaacacatacccaagactgggtaatttataaaggaaagagttttaattgactcacagttccacatggctggggaggcctcacaattatggtagaaggccaaggaggaacaaaggcacatcttatatgatggcaggcaagagactgtgcaggggaactgctctttataaaactgtcagatcttgtgaaactcactcactattatgagaacagcagcatgggggtaaccacccccataatttaattacctcccacacggtccctcccacaacacatgggaattatgggaactgcaattcaagatgagatttgggtggggcacagccaaaccatgtcattctgcccctgacctctcccaaatctcatgtcctcacctttcaaaaccaatcatgccttcccaacagtcccccaaatttcagcattaactcataagtccacagtcccaggtctcatctgagacaaggaaagtcccttctgcctatgagcctgtaaaattaaaagcaggttaattacttccaagataacaatggcggtacaagcactgtaaatacacccattccaaatgggataaattggccaaaacaaaggggctacaggcccatgcaagtccgaaattcagtagggcagtcaaatcttaaagctccaaaatgatctcctttgactccgtatctcacatccaggtcacactgatgaaagaggtgggtttccatgatgttgggcagctctgcccctgtggctttgcagggtacagcctccctcctggctgctttcacaggctggcattgagagtctgcagcttttccaggcacatagtgcaagctgtcagtggatctactgttctgatggccctcttctcacagctccactaggtagttcccccgtggggactttgtgtgggggctcccaccccacatttcccttctgcactgccctagcagagaggttctccatgagggctccacccctatagcacacctctacctgaacatctaggcgtttccatacatcctctgaaatctaggtggaagttgccagacctcagttcttgacttctgtgcacctgcagtcccaacaccacatgtaagccaccaaggcttggggtttgcaccctctgaagcaacagtgtacattgaccccttttagccacgcctgggacacagggtaccaagtcctgagactgcacaaagcagcaaggcccatgaaaccatttttttctcataggcctcccagcttgtgatgggagaggctgctgggaagacctctgacatgccctggagacattttccccattgtcttggcaattaacatttggctcctcattatttctgcaaattgctacagctggcttgaattttgcctcagaaaattgttttttcttttctgtcacatagtcaggctgcaaattttctgagcttttatgcttttcttcccttttaaacataagttccaattccaaaccatgtttttgtgaatgaataaaactgaatgcttttttttttttgggagatggagtcttgctctgtcacccaggctggagtgcagtggcgtgatcttggctcactgcaagctccgcctcctgggttcatgccattctcctgcctcagcctcctgagtagctgggactacaggcgcccaccaccacgcccggctaatttttttttgtatttttagtagagacggggtttcaccatgttagccaggatggtctcgatctcctgacctcgtgatccgcccaccttggcctcccaaagtactgggattacaggcgtgagccaccgcacccagccaaaactgaatgcttttaagagcacccaagtcaactcttgagtgctttgctgcttagaaatttattccaccagataccctaaatcatctctctcaagttcgaagttccacagatctctagagcaggggcagaatgctcccagtctctttgctaaagcatagcaaaaatcacctttgctgctccagttcccaataagttcctcatctctgttggagaccacctcaacctggacttcattgtccatatcaagatcggcattttggtcaaagccattcagcaagtctctaggaagttgcaaactttcccacattttcctgtcttcttctgcaccctccaaactatttcaacctctccctgttacctagttccaaagttactcccacattttcaggtatgtttacagcagcaacccgctctaccggtaccaatttactgtattaatctgttctcacactgttaataaagatatacctgagactgggtaatttataaaggaaagaggtttaattgactcacagttccacatggcaggggaggcctaacaatcatggcaaaaggcaaaggaggagcaaaggcacatcttacatggcagcaggcaagagagcatgtgcagaggaactgccctttataaaaccatcaggtctcaagagactcacacactattagtggaacagccacatgggggtaaccacccccatgattcaattacctcccaccaggtccctcccatgacgtggggattatgagaactgcaattcaggatgagatttgggtggggacacagtcaaaccatatcaattagtaattagcattttttgtttttgggttttttgagacaaggtctggtttggttctgttatccaggctggagtgcagtggcatgatcttggctcagtgcaacctccacctcccaggctcaagtgatcctcctgcctccaccctctaataagctgggactgtaggtgtgtcagcatgtcaaataatttttttattttttgtagagacaggattttgccatgtgcccaggctggtcccaaaaccctgagttcaagcagcctgcccaccttggcctctcaaagtgctgggattacaggcatgagccactgcacccagcctagtgatccagttttaatatgaaatggtgtcatattagagccttagattatgtacttattaataaatctaaaaatggttttgaaatgtatataaaatatatgttgtgtatgcacaaatgaatacaaaatataaaatataaaatatacacattcatttctatacatacaaaatttagatgtgtatatatatttgtgtatgtgtatatatttgtatataaatagaatatatacacattataaatgtgtataaatacaaaataatgcatatatatattatgtagtcctagctactgggaggctgaggcaaaaggattgcttgagcccaggagtttattatacaaaataatgtgtatatacattttgtatttgtacaaaataatgtgtacatgtatacaaatataaatgatatatatacccaaatataagtgaaatatttacacacacacacaaatacaaatgaagttgttttatagtcaaaaccctgccctctagtgtttatggaaaatatgccgttatttcagaaatgtcagattaagtatattctctatgtcaccagtagagtgagtccttgtacagggaaacaacttctccacattttgagaaagttgaaatcttcagacttttattttcttcaaaatcaaattgatatattttatcaatatgcgacatcatacttttataaaaatatctttgtgacaggttatgtattttatcacctaaaataagcaataatattaatgtaagcatttttcctaattatataaaagtaattcagattctttattgaaaattccaaaaaagaaaaagaaaaatggaaataatcaaggaaaattactgctgacattttaacatatatttttccattctttatgcatattttaaaaattgaaattgggatcacaatgtatatacttttttgtaagagagtaaaataaatcatatataactggtttgttaaaatagtagtcttttgctatctctgcagacttaagtacctgggtttttttttttttaacagaatagttgaagtgggaaaaccatttgagaagaccatatttactgtgactatcaattgtgtttccttagaaacaaacccctcagaggaagaaaaaaagtaacatttattactgtttagtaaatattaggtgacatatttaatgaaatcatcagtttgggtcaataattcataagaagaggttgagattagaaataaaagcattttcctttattcaaattttttatgtttactgttatatattagataaatcttagcaattttcacttttacgtaagcacaagatgtttaggaaatacaagatagagaactttgcaagatatatttccagataggtacttaatggacttcaacaggcatattttttggaaagatggttccatgtatttgtaaacttcgctaagtcaaaaggtatagtgcaatatcacatatataaacttgtcaattagtaagctatccttttctttgtgtatttaatccagtagactggatggaaagtcttgttttggttgttattaaaggtttgttaacagtgttaaagaacaagaggcagaggcagtaagtttagattttttggaatatctaaataggcattcccatgtttcactatgttataattcattatcctgcttcttctacactacctactcaacatctccagttcatttctcatcacttttccctgttcattgtctgggttttgtgagtgatttccaagagacaaatgtaacagtgtatatatagtcagtattttaacattttggttatcagctttaattatagttttcaggagttaatgcatctaactatgttacctacccgtggaaaaatactgcatgcaaagaaaagctagaactctaaagataatcgtgggctgggcatggtggcttatgcctgtaatcgcagcactttgggaggccaaggtgggaggatggcttgagcctagaagtttgagaccatcctagtcaacatagtgagatgctgcctctacaaaaaattttaaaaagtatccaggtgtggtgaaatgagcctgtattcctagccactgggaggctgaggcagaaggattgtttgatcccaggagttgaaggctgcagtgagctattatatcgtgccactgcattccagcctcagtgacagagcaagatacgctctttaaaaaaaaaaaaaaaaaaaaaaagaactttggggttcattctaggcttggccattggcagcagaactttaaagtcctcttgattgggaaaatgttagttatggataccagctgtgccttacagtacattttcctgaacaagtctaccttttaagctaatattctaggatttctagggatgtcttaagagagtcctattaaacattatgggggaactaatgccctcctaagccacccatctcgtaggtgttactattagtctggtgtttccattttttaatagatgaagaaaccaagtctcagaagtttaagccacttgcacaaagtcaagtaatttgcaagtaacatagtttgcaactgactgtttatttttattcaccatactagctaacttacctcctctgcattatgaaattcatcatcaataggaggaatttcactaattgaaacagcatcattttattgacaattaacaggcactctgagcttttgctatgtggcagttttgcccccacagtattgctaaatcaaaagactttctctgtcttttccattgttttctcctagtacctgtattccactttaagactgcactccacggttcacatcacctatgctcaagcttcatctagtggtgaaagtatgtagctgcaggttaatagttattcagtgtgctagaaataaaaaccactctgataataaatgtcacatctaggatagaaatgttactctatagtaataagcttagtggaaaaatgataacatgagtgatgggtcgtattgctgacatgaaaaaatgttcactatttagatcaaacgtcaaatttaacagcatatactcaaataaccttcacagtaggacattaacattgtaggaatgtaaaacaacctggggattccaaaataagtcattcttggcaagtaaagttggtttattaattttaagtctagttaatttgtataacctaagcatacagagtaaagtggcaagcgcccctagcatgtaatgatttccgtagctgaaatcattgtgaagggagttactatgccaaggaagctccttaataggactattattttatgctaaagatatccatagatatttatttccaaggaggaaaaaaaatcaatgcttgtatttaaagttgtgaggatagttcaactatataaatggaaataaagtactgctggaaatttcaaattgcaagcttatgctgatcaaaggtatataaaagtaagatttctggtgaattggatatctgaatccaaagcttggattgttgaatcatccagtgagaaactgattttaaataattttctctctgttttgagaaatgctatagaaatagcatgtcttgcagtcacagcattgtagtttttggagcatgtctcagttcttaaatcttcagttgacttctatgctaagagatttcttatcctgaatcttacaagtgaacatgagtctttttgaggcatagattgaattgttttgaaaagaaatctccaccttgagtataactctgttcagtttaatgacctcgaacatctatgtttatgctaaaaatatttttgaaaggcatgatttaaaattttcctagatagcttttaaaagagaccaaaaccttcaaagtcatctcacagatagtcattttgaattaccagaagtcaaacaaaattattatatttttatcataactagactcagttttaagctacagtattcttcaggtgtcctttgaataattacatttgtgcatttcctaggcagattggaagacacagttgaatgtctattttatagaagtcagcatgaatttactcttacatttttagagaaatttgaagtttggtatcttctctttagatatattattggttgtatttatggcttatttgatatagggttcatggccaaaatgcagggaaacttcagttattagtgttatatcatgatttctaggcatatgccaaggtaaagagtggtgtctttttttcacaaatgcctgctaaaatataatctatgagattagattgggaatttgcattatttcacagttaatatacaaatcagcgggtatctgctaccttcctcatgctatcaatctttattgtctgatcactatgaattatccatctttccatttcttcttcttccaaccacaaataacatttgataaatatccagacactcaattttagaaaacatgcttttaatttaatttttatttaatgtaacattatttatatgcatccttgtttaaaaaaattgtattgccttacaatgcaatctggaatctgcaaaataaattgtaagtgagaaagaaaagggaacaagttaattttagtttgaattaatttttggtaaattgtttttagtaactattttagagagtaacatgatctattactcttttacatgtgttacttcctatgtaaagcgttctgtatgtaattagatgctaacatttgtgtgtgagagtgtgttgttaactgtagtagggagcagcagatagtaaaatactttgacatgtgaatttcctggaacattcaggattcagtattggcatcctgtattataatgttacttttctattcaacattagtttgggtctttaaaatattgttattagggtttttctctgacgtcttcacattgagggttaggaagatagagaacaaataaaacagttgaatcataatatgcaattcaagaaaagggaacaagttgatttttgtttgaattgcttgaaatttgaaatttccagcagcactcagttttctttaatacagttagcctatcctcataactaaatacaagcactgattttccctccttggaaataagtatatgtggacatctttagcataaaataatatacgagtgttacaggttcttaacttgggcatatatataagccttggaggtcaaaaacagtgggttagttagtattcaaattagaaatttcttttccatgcagactagatttaacattgagcacagtgaattgactctactactctttgatacagattttggagagctgcctctttgtcgaatcagattctttattgccatgaactaatgaaacagatgtcagatggctaattgcagtaggagagaaaagctactgacaaaagagatggttcaggaacttggccttgatatttgagtatcatgaaatctcattatctggggactattcagagccatcaattacagtgctgtcactattaatgaatatattgatggcattgcaccgcggcttcttgaagtaaagggttaaagtacatgcatattgtgtaagatatatttcattactgttctgaatggagatatgcatagatataacaaaatcctctaggaaattgtattaactattggttttattgtttccataaagtgatacagctaatgagtgcttgctttgtacctttttttttttttttttttttttttttttttttaaagacaggttctcactttgttgcccaggctagatagcagtggcatgatcttgggtgactgcaacctttgccttctgggctgaagcgatcctcccacctcagactgctgagtagctgggaccacagacatgcgccaccacatctggctaatctggctaatttttgtattttttatagagacggggttttgccatgttgccctagctggtctcgaactcctgggttcaagtgatccacctgcctcggcctcccaaagtgctgggattacaggcatgagccaccttgcccagctgctcttgcttgtgctatttacagtgttatatatgagtagctgaagagggacaagtgtccatatgcccagagcaatactgacaagaaatacttgagagacagtgcttgccaattttgtacttggaaccctttttgtttgtttaacaacctataaattaccagaggcagcctgatataattaaaaagggtcttgaagtcaggagaggtagcttccaaatccaacctaccctagcagaaggacatttgagcaagtcagttagtatatccaagctataacttcctcatctctaaaatggagtaaaaataatggtaccctcataggcagtaagtgtaagtttactaaagcaacagatacgtcagatgataaagcagacatagtgtcagaggttttcttttcttaaggttttttgagctggaagtctgaccatggcctgccacaagttgccagttatcttttcttggataattgttatttatcctgagattttatcctttcttttttttttttttttttttttttgaggtcttgctttgttgccccaggccgaagtgcagagtggcacaatcatggctcactgcagcctcaactgcctgggctcaaacaaccctcctgcctccgcctcccaaattgctgggactacaggcgagtgctgctatgcctggctaaattttttatttttattttgtagagatagggtctcactaagttgcccaggacagtcttgaactcctgagctcaagcaatcctcctggcctagtctcccaaggcactgggattacaggcgtgagccaccacgcccagccaacaactaattgttaatattatctcatttagttttaataagaacactaatgaaaggaattattatcctcattttaaagattgagaattagattttctggtaggttaaaatagttctgtgactagtacagccatgactaaactccagtgaggagagagctagctttccaggtctttcattctgatcatattaaacaattgagcttcctattctctccattgtctcttgcttctgcgcatactgttaggtgtttagaacactaaatccctcatactcaattttagttcaggtattagctcttctttggaattttttctccccttctacaagctgaatggctcctttatgttccagtaatactgcctgcaaaacaatctactacgtcacaagattctgttatcttcgaaggcagtactgactccttactcatttctctctctttttttttttcctttttttgttggtttgagatagtctcactctgtcacccaggctggagtgcagtggcatgatcttggctcactgcaacctccacccgctgggttcaagcaattctcctgcctcagcctccagaggagctaggattacaggccaccacacccaactaagtttttgtatttttagtagagatggggtttcaccatgttggccaggctggtctcaaactcctggcttcaagtgatccacccgccttggcctcccaaagtgctaggattgcaggcgtgagccaccatgcctggccaaaattttttttgtagaaacaatgtctccctatatgctcaggctggtctggaatccctgacctcaagccatcctcctgcctcagccttccaaagtgttgggattactggcatgagtcaccgcatccagccctactaatttctctatctcctgtatgtaatttaatacctgataccgagtattctgtaaatcttggtgaatgaaaagggaattgagaaagttataaagaactttagagtaaaaagtaagaggcaaagtcatgtgtgttattttttccttaaggagagacatagcaaagaagtgaaattagggaagcattctctttaaaattctaaccctgatttcttaaataacaatggtcaagttcattgaaatcaactttgtctgctcttcagcaatttctaacaagtaatttttaggacaaaaggatataataaagttaatgtagttttacgtttctaaaaaggaaatgctttttaagttaataaaatacggtgttgcttgtttttttgttttgttttgttttccaagtttcaggtttagtgttaagatcttttgattccagataaagaactaactgatagtaactccaaacaaagcttatacagcttaaaaacttttagcaattggagattcctgggctagggatagaatgagaaaacaaaggcagctcagatgtgtgaaaggggaatagattagtaccatcttgctcatcccttctccctctgagccaatcagacacagaaacgaatagccagttgggtcttaagatgggcctttaacatatcttcttattctggcaagcacagagcgctttctgcttaaagcagtatcagctggaaatgaagttattattttaaattacaagagttctgtcataaaagcatctctgacatgtgggaatacctgtgtgggaaagaaaatacaggaataaatatggcatggaacaattattctaacagagtggagtctggtgtttagtattgtagtatagagattcagttcagatcaaccaaaactagcataaaaacaataaacaacctgaaacatgacaagagacctgctcagttctgttattctgtctctaactttttctttttaaggtaatttatttggaatttttggaagttgcttattcagtgctttaatttatgcttcaaaatataagaatgtagtcacttaaattgccaaagtcattgaattcatttgaatcttatattttaaatgtattccattcctgaaaaatgaaaataattataattcttttataatatattcactttgcaagttactatttaatagtaatctaaatatattgctagacattatattttcacagaacaaagtctagatataaataatggaagtctgggttctccagtgaattataaaagaagtcgttatgtaggaagagggtaatatcaagcagaaacacacacacaaaaacacacacacacacacacacacgcacgcacgcgagagagacctttaattctcccatttctttcttccatctacttcttgggtttgcttttatactactattgtttgtttctttgttttggttttaaagcaagcttaggtttaggtgttttacttggaagggagaatctaagtagatggtcagaagaatttttaaaaatctcttctgtacctaagtttctttactatatagctaagatgtattgatcatttactatgtgccagacacctggtattcacaacagctttgtaagggtagattctatttttgtttccattgtatggagaagaaaattgaaggtcaaagaggtcaaacaatgttgccatcttcataccccttgtaagaggcaaggctggcactcagacccgtgtttatctaatcatagagcttgaactcttaaccactatcagggactacataagtacttcattgtagaattttttattattgaaaggaattctctagaaccagaaaaaggtcataccttctatatagcttatctttcaggatatggaagtagatctaaagaaacgttctggttttgccattgggtactctattttactacttattctttcatatggtcaaatgaagagtcacatcttaacaatgttgatttagcaggttaaattatatccattaattttcatcatagataggtctccttaattgactctttgggactaaaatatttatatcctctgcatcattgttctagttttaagtacaggtaatgttgaccaataacctgttttaataggtaaaaaactgtacataatctttttgaggtgttttttaggattatttcttgctacctgggatacttacagaaatgtagaactgagaccgagcgcagtggctcacgcctgtatcccagcactttgggagtgctgggtggatcacctgaggttaggagttccagaccagcctggccaacatggtgaaaccccatctctactaaaaatacaaaaattagctgggcatggtgacacgtgtgtttgtgaccccagctacttggaaggctgaggcatgagaatcgtttgaacctgaaaggcggaggttgcagtgagccaagatcacaccactgcactccagaccaggtgacagagcaagactctgtccaaaaaaaaaaaaaaagagagagagagagagaaaggaagggagggagggcggaaggaaggaaatggaaggaaatagaagcgaccttaggttcatctggtccagtttttctcctgagaagcatgaaatcttaagttggagttccacttctggttcttttctttccctttacacaatgtacctcttttgtctgtcagtccattgctgtaccttttaaaacctgggttaaagcttgtatcattaaggaaacttaaccttgttaataatattgtgtgctctgctcgtttacattttatatccagttaacacaaaagcattttaaagcaaaggaatgttttaggaaaattcatctgtgcaatgtatttaagtacatggagagaatgtcagcaacttagaatttctttgtgaatttgttttaacctgtcacattcgtatatgcaaataataattgtagtaacatctccacaaatagtcatgccattttcaaaaatatataagccttgtaaattttgaagtaaaatggaaggtcttcaaagtgaaacatttctatgatgttgccatgaaaccgtgggattttttttcttgtttttttcttttacctcattcagtaatgcagttttatctactacccacttttgaagtttggcagtattaataataaataatgctgtagttttacttgaatggaaattttttaatttttatctgatcaagtttcccacgtttgactttttttttatttttagttgacacataataatcatattcattagtggaatacagaatgaatgatagtcccatacaatgtgtaatgatcaaatcaggctaattagcatatccatcactgaaaacatttatcatttctttgtattgtgagcattcaaaatcttctcttaaagctttctgaaaatacgcaataagttactgttaaccatatttaccctaaagtgctatagaacactagaagtcattcctcctatctgatcgtaattttgtatccgttaactaacctcctgctatcctctctcaccccacccactgctgtttcttccccggctaccccaccacccttctcaacctcgaataaccacagttctaccttctacttctatgagctcattttttttaagcttacacatgtgagtgagaacatgtgatatttatcttcttatgcctgacttatttcacttaatgtcccccagactcatccatgttgccaggaatgacagtatttcatttttttttaatggctgaatagtattctgttgtgtatatgtaccacattttctttatccattcatctgttgatggacacttagattgagtccatatcttgactattgtgaatggtgctgcagtaaacatggggtacacatatctcttgaatatactgattgtcctttctttgggtaaatacccagtagtggaattgctggattatatggtagtttcatttttagatttttgagaaacttcatactgttttccataatggctatattaatttatattcccatcaccatgttagactattacacagaatttcagaaattatagtcattttgctttattgatctaaattacgtaataaaggtaagttgcttctgatcaggcttattcttctgggattaggtcctttcctttcccttatctttctcttcatgaaattgtagaagaaccaatgaataaaaattacatattctctattcagtcttttcaaacccctctacccttctgttaccatttgcctaacagtgttttcctgcttcagagtatggaaataaaaagtcatgacctgcaataataagaaccattttggaatccatagtagactccatgatgaaactgaacaaaactgaaaccaagcctgggcaacatggcaaaaccgtatctctacaaaaaatcagccaggtttggtcatgcgtgcctctagtaccagggttacttttaggaatgccttgagtaagttgtccaggtcgttggcattttgaacaaagaattgaacaaaaccctcaaagtaacaaaggaacaaaatacatgaacgaagcagcgacagcagggatttattaaagtgagaaagtgctccgcagggtggaattgggcccgagcaagcggctcaagggcctggttacaaagttttctgggttttaagtactccttttgaggtccctgttggctgcctctcatctggatgaaggatttggtcttttgctaattaaaggctgaggtgaataggcaccctatgcaggatgtttgccctttccatctgagatgtagtggaagcgagaaggttgtagggagaataatagtctttgatcctttgttactccggtgtggggagatggggcttttcctttcagtttagctttaagaagtgtgccttaattggctttaggttccctgccctagacccaggtgttttccctttgattgaactttaggaaattggccttagattccctgcccccagatcttggtgtttctcttttaggaggttagcacagattggccttagattccctgcctccagaccctattctcctgcctcaccagctacttgggaggctggagtgggaggatcaccagagccccgagaggtggaggctgcaacgagccatgatcatgccactgcagtcccgcctgggtaacagagtgagaccctgtctcaaaaaaaaaataaaagcaggagactgaaaggaagccaccattctttttactccatgtagatatgacagctcttttgaaaataagctgaatcttgattacttctacactgctaaataaaaaactgattcttaggaatagggaggaagggacctgtaaagaattaattataggttttgttcctctgacctaaaaatgccttattggtaaaacatctcatcaccaccacccacatacatacgctcagaaacatagatctgtttttagatgctgtagtctattcagatgccttttttatttctgtatcagtttacttctttttaaaattactttgattttaggttatgatttgaaattttagaatatttattctttttgcacatttattgtatcagttgaactgagtatcaaaatgccaattttctaccaagaaaaatcctattgaactactactgagatctcattgaatttataggtgtttattaaaaaaaaaaagaaattgacacctttacaatgctgagtattcccaggttatggtggagacctcccttcattcaggtcctcttttttttttttttttttttgacggagtctcgctctgttgcccaagctggagtgcagtggcgcgatctcagctcactgcaagctctgcctcctgggttcacaccattctgcctcagcctcacgagtagctggcactacaggcgctcgccaccacgccacgcccagctaattttttgtatttttagtagagacggggtttcaccatgttagccaagatggtctcgatctcctgaccttgtggtccacccgcctcggcctcccaaagtgctgggattacaggcgtgagccaccacgcccggtccaggtcctttttaatgtctgacagtaaagtgtttttttgttttttgtttttttttttcatataatttacataggataaaactttactcttaaaatgattaagtatttaatattttcactaaaaactactgaataacaatattcagcaaccatcactgctagaacatttctatcactccaaaatgaaaaccccatacccattagcaatcactgcaccatttcctcctgcctctatcccctggaaacccatagtctacttttcgtctctatggatttgcctattctggacatttcatataaatggaatcgtacagatttttttttaatgtagtcttttgtgtttactcctttcacttagcatactgttttcaaggttcatccatattgtggcatatgtcagtacttcattcctttttaaggctgcatggttttccgtatggatataccattttttaaatccgttcatcagttgatggacatttgggtagttctacttttttactattaggaataatgttgctatgaacactcaggtacaagtttttgtgtgacttgttttcagttttcttggatatatacctagagtggaattgttgggtcatatgttaactctgtgtttaactttttaagaaacctccaaactgtttcctacagcagctgtatcattttacattcccaccagcaatgttcaggacttctgatttccccacatcctcaccaacacttgttttctttttctttttttaaattataaccatccaagtagtgagtaagatgtgctatatctcttgtggtttttgttttccatttccgtataactaatgacattgagcatcatcagcttttcatgtccttattggctatttgtatgtatgtgggcggcaagccacccaggtgccaaggcaagagaccgagggcatgagctgttccactataataaaatatataaaataagaatagttatactagatatagatcatagatgtgattatatatgaatatcattaatcattagtttgtagcaattactctttattccaatattataataatcctctctctacaatcataacctaggaaaaaccaggccatacagagataggagctgaggggacatagtgagaagtaaccagaagacagaatgggagtcttctgttatgcctggccagggccaccagagggctccttggtctagcggtaacgccagcatctgcgaagacacgcgttgccaagcggaccatggtctagcggtagcgtcaatgccaagggaaaacacctgctacttagcagaccgggaaggggagtttccctttccccgggggagtttagggaagactgtactcctccacctcttgtggagggcctgacatccgtcaggcccgcctgcagttatccggaggcctaaccatgtccctgtgatgctgtgcttcattggccacgctcctggtccacccactttcatgttccatcctgtacacctggctctgccttttagatagcagtagcaaaattagtgaaagtactaaaagtctctgatatgcagaaataatgacataagcctgtctctctctcttcctctctctctctgccttggctgccaggcagagaagggccccctgtccagtggacacgtgacccacgtaaccttacatatcattggagatgagtcacactctttaccctgccccttttgctttgtatccaataaataacagcgcagctagacattcggggccactactggtctccgcgaattggtggtagtggtcccccgggcccagctgtcttttcttttatctctttgtcttgtgtctttatttctgcactctctcatctccacaaatggggagaaaacccaccgaccctgtggggctggaccctacatgtgtatatctttggataattgtttattcaaatcctttgcccttttaaaaatttgactttttgtctttttattttttacttataagagttattttatatcttagtagactctatcagatataagatttgcaaatatttacctccattttatgggttttcacttaataatgtccttggaagcacaaaggtttttaattagatgatgtctaatttaggttttttctttagtttcttgtgcttttgttgtcatatctaagaatctgttgcttaattcaaggtcatgaagatttatacctatgtttccttctaagagttttatagtcttagttcttgtatttaggtctttggtctattttgagtatattttgtatattgtgtaaggtagaggaccaaattcattcttttgtgttcagtgtcctataacacaaaaaatacacattaatttgagatgaattacagatttaaatatcaaaagaagaaaagtaaaacctcattaagatacagaatatcttcataaccttggagtagtcaaagatttaatgaaaaagccaccaaaaaagcactagccattttttaaaatattaactggactttattcaaattaagaacttctgttcatcaaaagatcttattaagagagtaaaaaaagacacaccataataaacattatttacaacacgtatctttaacaaaagatttgtatctagaatacgtaaagaactctataaaccaatagaaaaaaatgagaaaaagttttgaacacaaacatcaaaaaagaggctttctgaatggtcagtaagtacattaatcatcagaaaaataaatattaaaaccactacaacatactctgcagacctactaaaatggttaaaatttataacactgataataccaagtgttcatggtgatgtggaacaacttaaactcatacgttgatagtggaagtgtaaattggtacaactatttttcatactttctactaaagcctaatgtatatctaccttgtaactcagcagttctactcctaggatctatccaagagaaataagtgcagattcccaccacccaccgaagacgtgttcatagtacctgtatgtataggagccccaaactggaaacacccatcagtagtaaaatgggtaaatacattttgctatatactgcagtagaaaagaacaaactaatactacatacaacatggatgaatctcacaaagacagtactgagcaaaagaaggcagacgcagaaaaatatttattgtatgatgccatgtagatgtagtttcaagagcaagtgaaactaatcttggtgacagccctcagtattgcagttacctcaagatctgcaggaggtaagttgaatatttaaaagggatctttttgcagtgccagaaatgttctctatctttatgtggttggtgagtatatgagagtctaccacagtaaaaatgcattgaactgtatataaatgttagacatttgcattttactggtatgctttaattaaaaaagtgaaatgcatgtatagatatagattggatgaggtagacattgtatttaattatcatttattgaagatattaaactcattaattgaagataatattttcattttacttgagtcaattttaaataagtcctctatagagttttgacaaaggagaaccataattccttcagtctttgttaacagactttagagatcacaaatgagagtcacaagagagaaagcctgcagggattgtctgtcttcctccaaagaggaaaatcatggtgaatattttgaaaagctttaaattaaagcaagtgattcttcaaagatttaagtcctttacctagcagtagtctgtgacaattgctacagtgttcccagtgggaatatggtacatttgagatgacaaagactaggaaccactactcccgagcattttttcattgccattaaaatgcattgctttgcctgcttagtaaggaagtcactgaacatttgagcatgtacatctcagtaaaattcaattctaccaacattgtagttgtcggcttagtaaactgaactttaaaggtttttctatttttgtgggattgtgaggatcacaaactactaaaacagaacaattaactctggaaaccttttgatgattaactttattgggtgagtacagtcatccccctttatctgtgaaggactggttccaggattccacacaggtatcaacatctgaggatacttgaagtctcattcaaaaatggcttagtatttgcatataacctaagcatatcctctcatatactttaaaacatctccacattatttataatattatacctaatacaatgtaaatgttatataaatagttgttttattgttcagggattgacaagggaaaaaagtgtatacatgttctgtacggatgcattttttttttcaaaatatattctacctgcttggttcatttcgcagatgtggaacccactgatatggaagaccgaactgtattaatttaaaagttttttggatcgtcactaaatattttatgatgaatgataatgctgattgttcaactttaggtttctgttcactagtcatcaacatatatttgaggaatttcttttttaaagggacaaagcattatacctattttacgatgtagataggtaatataggtaggtagattaacccttaataacacatgagaagcatctttgactagccctagttgggtaaagaaaggttgagtcgaaagtaaataataactcccttggaacagagcagggaaccatcaggaagcatcagggtctatgtagcttcagatgaatgcaaagggctcttctttgaagaatgtaccttcttcaatctctgccacagatattgtgcgactggaatcactatgaggtgctcttcaagtgttagttcacagctaagtgcttctctggctttggctactccttaggaaaggaggagaggatatgggtatttatgaccgtctcagtccagggcccttactgcttttgtcttttggcttttacttctgctagtgcaccttcctgtgtgtcctcaatttgttttgctccagaaaggagagtattctgttctgccttctagagagtctcagttggatactaccttcttttctttttaatatgtctgattcttactaggataagcaaatagtattattgcaatacagttagtgggaaaaactgttgtaagattgttacaagataaaggaaacaaatgtcagggaatattcatgcacataagagttattaaactagttggcactcctagcaatcataaaagagatgtgtctttgctgattcttaagaactcattgaaaaccacttcaattaagtaacctattagaatgatagctgaaatatctatgaaagacatagggagttccttcatataacctaaaagtggtgcaaacagaacaaatacttgaaataatatgtattttaagtcaaatcaaagtaagaacagacagcatggaaacacaccgctaattaatgaaagaactgtttgtaaaataacaaaacttataccttagaattaggttatggctacacacagtgacaatgaaacacagtaaagaaataatagggatgaaactcagcattactcatcagtaatgatttgaaacaactgtaattgttaaccagtacagttttgacacaggacttaataagatctatccactatttatcctgcagatgtccaatattctttaagttttgtattcatatgtgaacatttgggaaatacactccaaggtcataagtattttcgatgaaaacttttggtgtctttgttataccacgttacatttttcttttttgatttgtgtttttctttttttctaggaaactgactggacattctttccacatgggctatagcatggcgattttgaatggcatcgtagctgctcttactgtagcatggtgcctcatgtaaacccacactggagcgatattgttggcaaaacttaatcatgattgttttgtaataacaagaaggagcatcactgtctactcagaagactgagaaacctgctgttcattatgtagttcagatatttatcacaatcatcctcattatggaagaccttttaaagcattgttttagaatgtctgagtattaagatacagattaattgggaatatctgagtattaagtactttcttcagagtataagatgtttacctcatctttttacttttgtgtgtgtagttctttcaagttgtaggaaacattttaatggaatttaaactcaaaaacttgaatacaggacaatgcttgccttttcatgtatgtactacattttttgctaagaaatactgatatttctgtttagttgagctagaaatacttcttatttatacatttaggaaagcaaataatgcctactactccgacttttatagaagctacttttaaatcagaatatttaatttttgatattcatataattaatagaagttgcatttatattttttatggggcatagttccttatgtgtttttttaatgtattttcatactacatactgaatttgtatgtttttaaaattgttacatctagacaactgtaaacattatttttttagctagtgcaaacctagtacctgccatttttactaatttttgtctttaaaaaaagcaaaaaagcacattgacctaagttgaaaattaagtaagtttatttttaacaaaaaatgcctgaaaaaagctaaattatttaagtcattaagatattgagaaaaaatttgaaatttttactatttctgtttccacaattccaaatatttatcttggtgtatatattgttactttaacagaacttgcattattttgtttttaataaatataaacatgaaatttttgtatgtgagaatgattgaactagtttgttcttaatctcaaaaatttagttaccaaagtagaaaaggtattttgatactagatattaaaaactacatatagttaatataattttataatttttgtaattaaatgtgctcctgtaattgtgatattttgttttctaagtaattaagccttaatttttcccctatgttactaaagacttttaatgtttagaaagttacctcagttttagaaagatggactacttacaaagctgttttccctggccataggaaaacttacaataagaaaccattaagtagtcaaactgcttattcaggctaagtgggaaatgaatttgtgcagtgtgttcccttaattatctactgaatgttgttaccgactaaacaaggtttctaaaagtctcgcatttcttttactattcaaaactctttggttggaaatgactaatactgctccaatttaaattatctgaaatgtgtgtgtgtgtgtgtgtatctaaatatcaatcccatggcttaagtattcctaccagagtggtggttgccatcagtctattttcactccctgccttccttcctgcacgcttaaactcttcaccctttgactccaaagagccctttcattgcaaagatgtacacaagtaacagaatcaatttatcttctctccaccactctgtattcccacgcaccaccaatgtgagtaactccctccagattgtttgtgtctaatgactaggaaagttattaacagtagaccctagatagagatatgtacaccctagacagtcatgtgccatataacaacgttttggtcacaacgaactgtacttatgatagtgaatccccccgtaagattatactgctgcattttttactttattttttctctgtttagatacacaaatatttaccattgtgttacagttgcctgcaatattcagtacagtaacatgcagtacaggtttatagtctaggagcaataagctataccatatagcctaggtgtgtagtaggctataccatctaggtttgtgtaagtatactctgatgttcacacaatgatgaaattgcctaatgacgcttttctcagaatatatccttgtcattaagccaaacatgactatatatacctacaagatatatattaatatagataaatatagagagagatgtatccgtaagatatttttgtggaatcctaattcttctggactgttactccccttttttgggaaatgaccctcctctctccagtctgacacagggtccaaatataaatcatctatatgcagaatgattaggcaaggatagtcacctaactctggctgagctaatcctaatctcattttgcctggctacaatgagtagaatagagaaatgacttcagtgaagtatgtctcttcccaggatttttcagcttgaaattaagatgtgacgaagctgggaaaatgcaagcccaggaaatgctggcagctgtagttcagccaggctcagtgggaaagaataaggctgataacggatattgctaatggcgttaccctggtccctgaagcccagtggcaatcctgccattcttgatacgtgagtcaataaatttctgtcttttggcctttgcagtttacattggcttttgtcatttgcaacaaaacaagtcaaaatgagcttatctagcagctggaatccatctctattgtgaaactgactcagatgatctcatctccttatgtgtagcttacagcattctatttagttacttgtgaaagataaacggggtgtaagtattcctgtggctagtgattagtctcagggacttgaaaagacattttagaataaattaaactattattaatcttgctgtttcatcaagaaattatgtccccaaattcagttccaccttaagtgttatcagaaagaatattactgtagttatcaagatatgattctttagttaatacaacgtaatgagtttgaactacaa

SEQ ID NO: 43 - DNA, 128733 bp, Homo sapiens
  source 1..128733: mol_type = genomic DNA
aataaaccctgggtttttaggatttccagaagcccccaggagggaggtccccatcagtgggagactacaaaggaccaggaaagacctacatgagctgctttaaccataagccagcacagcaagcttgaagctgctcaactccaggaagaaatgctccatctccttccttctcctcctcctcctcactgccagtttgatccaagctgggccttaaacaacctctagtgaatagaggggcgggtgggggtcggggacaagcctaagcctagtgcaccccttcagggaaggccagctagagaccttaagcctggggctggaatgggggaggaagactttttgaagtttgatgcatttgtttatatcttgcacccaacattatagttttgaaatgaagctgtggttgagatttagttacaacaagactgtcagttatctaagaatgagcagaaaaatccagggctgtttcgggtcctaaaattatccaatcaacgaataggtatttattttctgttatgtttgaaatcctcttgagtattttgaagaatatttacattcctttagttcaggttagtataatttcccacctggcacgatgccttacacatagtatgtgctcaaaaatattttcaatttaattattctttacaagatgcttagcaccaagggaagtggcattttcccagtgttgatgacaaatagcacttcagctggaaaatctccatatttataaaacgtggtgcaaacctgaatggagagtgcttatgatctcacttttatttaacactgtacagtgttgctaaatggtctaacaggagaaaagggaatttaaactagaaacacataaatggagtgctttttgccgttcaactgtgatgatgcacgaacaaaaaacgattggccacgggagacctagactggaatctccttctcctgctcactacacctcaggcccccagttcctctcctgtggatggggacgccaggctgcctacctcagactcagaaggtacgattacgtgcatacactctgcgaactgaagggctgtacaaatgcaagggcttaataacagccaacagtttaatattcgttgattgccacgtgcatagcgctttacatctattttctcatgcagtcttcataacagcccaagacctacctaggtactattattaatatttcctgccacttgacatcggaggaaacagaagctcagcaagtggctccaggttatacagagccctaacctgagccagtaaatccttcttacccacaagcattaagcttccgtcctgcctgctgttatttaacagaggtgctgggatccggcaggggagcaacaaatgtggttcggcaaattgctaaacgaaaagcggacacccgcccacgacgcctgctctgatctgacctcccggcctacagccctctccaggctcctcccacccgctccggccgtcgccacgcctcggagcttctacgcatgcgttggcgggacccgcgcaggcccagtggccgagcggcgtcgtggggttaccccgcccgcgccagcgctgcatccctggccgctacccggggagagccggaggatgaattgaacctcgcagccgctgctatctccagtgctcatcacaggtgctttgggtcaggtcggaagcctccttccctgagccctcgccaagctcattccccggcccgcctctcccgccctgcagcggcctggccctgcggtctggctgccggggcggcggcgggaggtagtttgtgtacggttaccatggagacgctggctgcggggcgaagtgggagggtggccgggcggggtgaggatgctgctgcgccctgccctggccgggaccgtggaggagcgggcactgccgtgggtgggggagccgctgtccgagcgggaggtgaggtgtccccagcggctccccagggacccttcctgccgtcgtccgcctgtgtgtcctcggatggggtagagagacgatgagtgccctgtgcatgctgtcaggggtccggagcggttgtcttttatttatgtactgtcgcacttagccaagtgcgtggtgcttaataagaagcccagtaatatttgttgaatgagagtggtagactaaggggctttgtctaggcaggcggtgaccgggccagagtcatacagtttatatctgggcacttccaggcaacagggcctcaataaataaaaacgtatgtgtaacaatatttaacatactttaaaatcatggagtgtatacataatgccttttgtgatccattcccacaagtaacacaacagatcttacgtcccaccctgatttataataattatactttaatttggttgaaaagcaagcaccatttattatatttatcctggtttcttaatctatgggattctggttgttgatgttgatttggcatagctgatattcaataaaatgcttaataaaaattatctgttttcataaaggcaagtaccaccacccaccttttaaaaggagaagtacgtaatgtaaatgacgagttgatgggtgcagcaaaccaacatggcacatgtatacctatgtatcaaacctgtacattgtgcacatgtaccctagaacttaaagtataataataaaaaaaaacttatgtatagaaacactgaacaaacgtcattctctcttttgcaatttctttttttaaatgtagtttttcattcgtggaaatgattttgctgtatccttttatcatgtagcacttgggcaataattgttaacatctttaagggccatattttaaaatgttaacatttttaaagcactgtgctaacgcactttacatgtattatatcatttaattcttcaaacaatcctatggggcaattattattactatccaccttttatagatgaggaaactgatgcttagagatattagaggcattgcctaaggtcacatggctgtgaattgtcagcatttaaacccttagtccagcatctaagcacttaaccactgcctctttggatgctcatattaatacaaaaatgattcagagttatggaagggtcctgagtatttgatttgcagggaagactgtgaagctggcctgcttttcccctgttgcagacatcctggtagtgcagtgttgcatttagcaagaaggctctggttccagtggctattagcagcaacgataaagacaggtctttataattagttataaacttctataaattatgactctgagctttcacccagaccagtaggaaatatcttgttgaaaaaaaagttcttcactttcaaatttcctactgctggtggtgttcaccctctagaggtcctgtggataccatggactcaggatagtgtgatgcaagacagaactcagcctctttcttctttcctcttgaaatcagcttctcctcctgtttcttttaaaaggtcccttgccctctggctcccctaggtttgcatacctagtgttgtttctggcctcttcctggaatcatggatgccaaatcctgttaattctgttctcagtgcacctcacttgttctcatctctcctctaacctctgcttcaccttgactcctgtatctcaggctttccgtacttcactcattcgtcacaacattgagtcctactctgtgccaggcaacttgaaataaaggcaagacagggaaaggaggctaaatctgaactcatctgaccacataacatcaaaaatcagatttgaaataaggtccagatttcataattcactgtaacaaatatctccagttagagaaactatgcagccttcatctgaaaatgtcttagctcaagtctatatttaaaaatggagtctagtgattacgtaagtgttgaccttcagctgtgcctcacgtggacggttggggcagagagtctcgggccaacaccacatgtacagggaattctaacacagtgggagagtggagtggcagagaccagcccggggccttttggagtctggacgaggggcacttaactcaggctagcagggtgggagaggcatgtccaggaaagcttccttgaggaaatgacctttgagagttagctgggtgattacataaaaactgtctgatttcactacttctgatctttgccctcctttccttcctgcccatctctgccagatcacatcatccctcaaaatgttgtatttgatctgctcatcaacttttgatttctcgccatttaatttatttggttcagccccaatggccattttcagagttccctcttgtccacacacaccctgtatgtcttgatgctctgcgctggctcacttgccgactttgttggaacttccttctctactccagctccagtgccagccactgccacttgctcaaattcagcccttctttcacaaccgagctcaagcaccacctcttccaggaagtctacctgatgtcttcccccaatcagaaatctcttcttcctttgtgatcacataagtaatttgtctctattgtttttattgctgccatcagtttctaccttgtatttaaatcatttgagtataagcagggtaaatactcactgggtacgtaccaggaaggctgctcctgttgggaaaatattggggtctctgtgtgaatgggttaatagttgcagccccaatgcctctaagtgccccacctcctaccagccatctagtgggtaagagtttgaatattatctgtgggcatatatcatagcttttttttttgtattgcttaagaccctgtccagaccatggattacatggtggctcacacctgtaatcccagcacttcaagaagccaaggaggatagcttgagcccaggagtttgagaccagcctggacaacatagtgagacctcatctctagttattattattattttttaaaagattctatccaccttgcaaaattgttgtggggttaattgagataatgcagtcaagagtacttagcacagtgcttggtgttaaagtaaatgtttatctcacattagtggttcttcttgcttgagagtgaagacggtcttttattcctctttgtgtttcctcttctgtgtttcccagagatctaagcagagggctttgcacataggaaacagttaatcagtacttctagctgagtggatttgctctacttggaaggaaaattttgtaaagttagaatttctgtaggactattgtgttatggttcaggtatactttaagtagataagctttcaggtcctgagtgattaatttttcaagttggcaaaaaccatctataataatttgtagtttaacaaatatcaatttaaaaatcctccccccaaagccccacttctaattcttctaagtcagttcacatgtattattaaatatttccatgattgatttagtgaatattaatatatgatcataacattgtgcagattttacattattgtacaagtttctcacaatataattgttaaagtgagatttggtggaaaaaagaagaaggatagagaaaattgtgttagaatttttggtaaaaatttgtagacaaaaatatttttagccctgtatctacattgtttctatcagtatagtatttggtcagtctaaattcctatatgcccccaggtaattcacagaatttttagagtttgacctgagtaaatgttcctgcttcatcactctctgaaagagtatagtttttaatgcaaactcaaagatagccagagagaaccttaggtcaggagtgagagtctattattactccccacagaactttctctaatctttattagatttgccagattacttttggacattgttagacttattagtgccatgtgaggccaaaggggtggcaaacctgatttaggctctggaagaagcctgtttattatacagaaacctcttctcacttagtggcataatttcttactgcaataggtcttttagaaacagaccaacaaacctgtcatggctgcttaagttagatgttacgggactgaatttgtattatgcatccaaaaataatatacaatatgtagatataaaaaattgtgtatatattttaaataattatgattgaatattctaaagtaaaagccaatcatttcaaaagtattggaaataaaatgtactaggcctctcatcatttttgatagttatattaatgaatgtaattgtagagactgtgcttaaattcaaaatcctgtatcaaaaattcctaaaatagtattgcttatcaagtaatttttttactgttttaactcaacacctggcatttccatatgaaaagtatgacatattgtttatagttttcatcagaaactcttggggtggggcctgtgtagaaggaaacaaatgttcttattgtctgttgttatgtaacaatgtttagaatcataatatagtaaatctttatttgtctaaggaatcacctgttgattctacttatagaaatggaatctttttagtttcctggggcatgtgtcacaaagcagttttctgttgtgcagaagttattctaaaattgggtagctgaaataggtgaaaaattcatagatctctgtctctttagagatatgacattttatggactttgagtttttttttaagaaacacctaatgctatatactcattagaattacattttaaaaatctgtcctattttaaagttcagatttgtctccatggaacacaccaacatttgagaaggatctgcattctcatggcccttgtaatgactttaactctttcaggaaggggtgttgggaaaggatcagttggtattgatatttggtatttatttacttaggtcattacctcaaattataggtgagttgaatcaattcattcagttatatcatggacaaatgtggggctgaactattctctgaggtttgttgcaaaatcaagtgtcctttagaaatacaacatttctgtctaaaatgtaaccttatagtatcactagtgtggagggcagtggggaagaaaaggaaactgtaaacattttaacagaaccctcagtgttttttgtaggctgaagaccatgagatgattcgctcttcctattctgtcttctttcatgattagtctttctctctgggtttagctttcatcctggttttctttcctgcacatctttgtcctcagttgtatatttttgaggaaattttcctctctacatttttgagagctgttctcagatcctaaccttctaactgcttggtggatttttaaaagcttaatatagaggaatgatttagtatatggatgggcttaagcattcgtttttataaagtcctggacaaaaataatgatggtttttgtaccatgtatttgcagggtgtggtgtctatctgaagaatattttactttcaaaggaaagatgctgtctccaaatgataaaatgttaggaaaactggatccattttatcaaccttcagtgtccaagcagaagaccagtgcagaaatcataagtgaagcaagaaatgcattaagaacagttagaacccaaagaccatttacaccacaggaggctcaaagaaaactattcggacctgcatcctcaagaacatcagaaaatagacctccttcctccttcaggtatatggcatttcacattcatgttcattcagatatttaagcaccaggttataccttcccttaattctacttaaggttagcttttaaaaatagacttattttttagaacagttttaagttcacagcaaaattgagtggaaggtacagagatttcccatgtaccccctaccacaacacatctgcagcatctcattatgaccatcccccaccagagtggtacattggttaccatcgacgaacatactttgacacaccattatcactcaaaggctgtagttcacattggcgttcactcttggtgttgtacattttatgtgtttggacaaatttctgatgacatgtaaccactattatagtattatacagagtagtttcactgccctacaaattcttcactctgcttatttttcacttccttccctcatcccctagcaaccactgatctttttactgtctccatgattttgcctttgccagaatgtcatatagttggaatatacagtatgtcaccttttcagattggcttctttgacttagtaatatgcatttaagtttcctccatgatttctcatggcttgaatagctcatttctttttagtgctgaataatattccattgtctggatgtaccacagtttatctatccattcacctactgaaggacatctcatttgcttccatgttttggcaactacaaataaagctgctataaacatccatgtgtaagtttctgtgtggacataagttttctttctttttgtttttcttttttttttttttttgagatggtgtcttgctctgttgcccaggctggagtgcagtggcacgatctcagctcactgcaagctctgcctcccgggttcacgccattctcctgcctcagcctcccaagtagctgggactacaggcgcccgccaccaaacccagctaatttttttgtgtgtttttagtagagacggggtttcaccatgtttgccaggatggtcttgatctcctgacctcatgatccacccgcctctgcctcccaaagtgctgggattacaggcgtgagcgacctcgcccggccaagttttcaactcctttgggtaaacaccaaggagcatgattgctggatcatatgggaagattgcgtttagctttgtaagaaactgccaaactgtcttccaaaggggctatatcattttgccttcccaccagcaatgaatgagagatcctgttcctccacatcctagccagcattgacattgtcagtgttctagattttggccattcgaataagtgtgtagtggtatctcattgttttaagttactttccctggacatgtgatgtggagcatctttttatatacttattttacatatgtatgtcttctttggtcaggtgtctgttaaggtctgtggcccattttttaaatgggttgtttgtgttgttgaattttaagaattatttatgtattttggataacaattcattatcttacatgtcttttgcaaatgttgtctcctgctctgcagcttttcttcttcttctcttgatagtgtcttttgcagagcagaaaattttaattttaatgaagtcaagcttatcaattctttctttcatggatcttgcttttggtgttgtatattaaaagtcatcgcaatacgcaaggttttctagactttgtcctatgttatattttagagattttatagttttgtgttttacatttaggtctgtgatccattttgagttaatttttgtaaagggtgttaggtttgttttttgtttgtttttgtttttgtttttgcatgtagatgctagatgtccagttgtcccagcactgttttttttttctaggaatatgagccaaagttttacttgttaatttcttgcatttgaagtactctttgataacatccttggcttgagacttttcccatagtcctaccacacaactacaaccaaccattttatggggtttccctctctgtcagttttacagagacctacccattaccctagtttcttgtcatcaaccttaattaggtggatttggtgttcagctcaaagggcctccatcaatttgacatacacaggctcatcacagttagatgaaagccacaaagatgggcttggctcttgtctgacgctttgacagcttcgcaaattccttgtgctaggctgacctggatgagagtggtcttcagcacctcttttaaagcagtattaacatccactgcacctccagcagcagtgtcttcctcagccatggcaatgggttatgagggaaggtggatcttgaatacactgagcctccacctcagcgaaagagcccagcaccattttttgaagaagctatgttttctccattgtattgcctttgctcctttgtcaaatatcagttgactgtatttatgtcagtctagttttgtgccctctattctgttccattgatctgtttgtcttttctttcaccagtactatactgtctttattattgtagctttataatatgtcttaaagtcagggagtgtcagcccttttaatttgttcttcttgttcaacattgtgttggctagtctgggtcttttgtctctccatagaaactttagaatcagtttgtcaatgtctacaaaatgacttgccaggattttgactgcgattgcattgaatctatagatcaagttgggaagaactgacatattgacaatattgagtcttcctagccatgaaaatggacgatctcttcatttatttagttttttgatttctttcactgagttttatagctttcctcatctagattttatccatatcttgttagatttataactaaatatttagtttttggagtgctaatataaatgataatgtgttttcatttcagtttccaaccttgtatcttgcaaccctactataatcacttattagttcctggagctttttgtcagctctttaggattttctacatagataatcctgttatctggaaagagttgtttcttccgtcccaatctgtatgcttttaatttctttttcttgtcttattgcattagctgggatgttctgtatgatactgaaaagcagtagtaagaggggacatccttgccttcttcctcatcttagtgggaaaactcttatcataaaatatgatgttagctgtaggtttcttgtagatattcttagaagttttcttctattcccagtttgctaagaatttttattatgaatgagtgttggattttgccaaatgctttttctgtatctgctgatatgtattctctttagcttgtattttatgtatcttctttagcttgtggtgtgatagattacattgattgattttcaaggtagttgtctttttaaatttgacttttgttcaaaattcctaaaagtaattacaaacattggttcaggaagttactttggaatgaaatggttactagcagttgtcccataccagctttataaagtgatatgaacaaagctttttaaaaaattactctatacacttcttcttttcattattcagtattttttaaacttcctaaaagtaatcaaaagacttgttaatcaactgttttaagtacaataacatgaaaaaatgtttttcctcatggtttatgcattgcatccttttacttgttttttagctagggttaactaatatatactataaataaagaaataattcttcacaaactaacactctgcaccatcttttatgctagcctccatgcatccagttttgagtcatctgattccaggcctatctctggcacacgtcttagtccactagagctggtgagtactttgtataaccaccagtaatttatattatgttgtgaaatgaaattggccaaaaacacttggaatcagtacttatatatgctatgataattatcatgtacacctaaatagactaataatttaatatgaaaacagattcttttatattgttcaaatgtaatgggtaatatctaatgaaatacttctataatttacctatagtttgataataaagaagaatttttaaaatatataataacttggtaagcaatatttcacaatatttttgctttcttagttatacatatgtattattttcttaacagttatatatacaaaaattagatgtataatttatattaaagttatatatcttatacatatataaaaatcatatatatttatatgtagtctctctatatatacatttacatataaatatatgtattcaaagatttattacaaaaaaactaacaaaaatccaatggtctcctgtccccttgttcttcattgttccctcctcagtggctttcactttaagctctttcgacacatccttttaggatttacatccagacttcccaatgccacactgtcttgctgctttctgacttatgagcttgaggaattatctaatgacttctaaggaagatgaagatttagtttctgtctgtctttttgcctcttatcacaatgcgttcaccttttctatccccactattactcccatatagatataactttggttagatctgttttctctgactgtgattacataaaccctgttcatagctgagacttgaattaatgataaattctcctttcctgtaccactttttgttttccctggcattaataattgccttacttttaaagttttgtattattagtatttcaaccccaaactcttccccagtggccttaatcaccttctatgttcaggcacatgaggcattctatggatttacctccttggagaactcttcacacgtcctgcccaaccactttccctgagcacctggtgcacagctctcctggggtgcccctcaccatcctcctggggagacggcttctccttgtgctggctttttcgtggttcttatgtctcaagtcctctttcttgatttactgtggatttggtagagcattccctcctatagtttcttgagaaagggtacatgggaagtaaattatttgaaaccttgattcctgttttttcttctctggaagtttgtaggatgtttctctttgtttctagtgttctgaaatttaataacaatggtcctttgtgtgagtctatttttatcaatcatgctgggtacttgaagggccctttcaatgtggaatttcatgcctttcagtaaacatggatattaattgaatatttaatatcatcatagtgtcttacccacttttttgttctgtttgctctttctagaatttattattcagatgtaggacttcctggctgggcgtggtggctcacgcctgtaatcccagtgctttggcggacccaggcaggcagatcacctggggtccggagttcgagaccatcctgaccaacatggtgaaaccctgtctctactaaaaatacaaaattagctgggcatggtggtgcatgtttgcaatcccagccactagggaagctgagacaagagaattgcttgaactcgggagatggaggttgtagtgagttgagattgcaccattgcactccagcctgggcgacaagagtgaaactctgtcttaaaaaaaaaaaaaaaaaagatgtaggactttctggactgacacttcagttttcttattttctctcttttctgttttacatctttttgtggaagagactgtattctgatccctttattgagtttttttttcatttctgctgtcatatttttaattttcaaaagtttttttccctctacattatctctttgtatagtagtctgttcttatttcatggttgtagcatgttatctgagtatattagtggtagttttgattttttaactaagttttcttctccctttatagtctctgttgcatttttgtctctgctttttacactagagacttcctctgatgcctcatgctgtttgtttggctgttcttaagagtagtggcagccaggcgcggtggctcatgcctgtaatcccagcactttgggaggttgaggcgggtgggtcacgaggtcaggagaccgagaccatcctgcctaacacggtgaaacccagtctctactaaaaatacaaaaaattagccgagtgtggtggcaggtgcctgtagtcccagctactcaggagactgaggcaggagaatggcttgaactggggaggcggagcttgcagtgagccgagttcgcgccactgcactccagcctgggcgacagagcaagactccatctcaaaaaaaaaaaaaaaaaaaagagtagtggcatgtggattgaggttggtcaacctataggtggtatctacccacacctgtagttagggggatctgactgggctgtgttgttgatgacaccccagtggcagtatctttaggacttttcttatgggctagttatattctctgtaaagaagtatcttccacgctgtttcctggatgttaaagtctggttgctagcttccaggtgcaggaagaaggtgagaatgcccagcatttaggatataaatattcaattaacatccatgtttataataagtactctgacctcaacaataagggtacttacagtaatagtacccttacttattgacctcaattaaggaagaccctctgttttaccttctttagagaataaacccatcttcttctggctttggtagcctgactgcatggagctgggaaggatggaattacacagaatttcagctaatcctccttactttagccactccttcccttctacctctgctaccaaaagtacttggtgataccagttccctaggctttatgagattggtatgttagtcaagcgcttctcaatttctgttactctgtgtttgtgtgtatgtgtgtttgtatgtgtgtgtgcgtgcacacgcatgtgcttgtatgtatgtttgttttggatgaaccatttgaaagtaagttgcagacattgtgatacttcatccacaaaaatttaagtgtgcatctcatatgaacaaggacagtctcctacataaccatgataccatcatcatagctcagaaaattaacattactcagtaatatcatttaatgtatagtccatgtccaaatgaccccaattgcctcaaaatgtatcttatatttttaaagtatttatcagaatgcctctgtgaggaagattatacttgttcatgtattgcagatgacaaaaacaagatcccaagatagcaagcacgaaccaatattgcaagaaataatttgccagctattgttgacacatggcttgttaacgtctacaaccttgggaaccacttgggttttgagccagctacagcctgaggacccagttcggcagctcggtggctctaccttattgtagagtggctctttattctatgattctgttgtttgactcctgtaaattgcttttaatattactgtagttttttggggactcactcagtttgggactcagtttgggtttacccttcccttaaaaagaatctcattttctagagataacctggtccttgtcaaactggtacagttcttggactgcagaattagctattgggctaagacaagataggcatttatctgtttagggtcattgaacttaaatttccatacctctgaatggttgggtgctatgttcacagtaaaagtagacggctaggctcagtggctcatgcatgtgatcccagcattttgggaggctgaagtgggcagatcacctgagatcatgagttcgagaccagcctggccaacatggtgaaaccccgtctctactaaaaatataaacattagccaggtgtggtggcgcatgcctctaaccccagctactctggaggctgaggcaggagaatcactttaacccagcaggcagaggttgcagtgagccaagattgtgccactgcactccaacctgggtaatagagtgagactcatctcaaaaaaaaaaaaaaaacaaaaaaaacaaacaaaaccaaaaagcaaagtaaaagtagtctaagaagttcccattttaaggaaagtgactgcttaatttgagattgtggtcgttgatgttattgtggattatgtgagggtcttaagtacatttcattttaaatagtaattaaaatttggggcccccagtcaaaaaattctgaaaatgtccccatgctacctgaccttccaccttttttcttctttatcacttcatttttttaaagaactctttgcctctgataaccactaaattggcaaagggcagagataggggaagggagagggagtggagagaaggagataactggagagagagggagagagagtggcagaggagtgtctcacagttaagggacacatttgctgaaagagtttgtgaggacctaaccagttgaatctcagtgctttttggatctaggacacttttcagaccagtttgccttttaacaagtcctccaccagcagtcagtcagggaacagggactcagacagcagcctttcagctcctacattgagcagattagctcaatgctgcttttgtacagctgccctctctctttctccccatcctatctggcatgtgctccccactcaccctccagcgggcaatgggctgcccacactcaggactgcccagtgcttctgagaagaggaagagctgacgcttgtggttcctgattgctcaggccctgccctccagcccgacttgcccagggggttcctgttagcagaaacactctgatttgtagggttttgtttgtttgtttgttttgttttttctgagacagagtctcgctctgtcacccaggctggagttcaatgacatgatcttggctcagtacaggtgtgcaccaccacacctggctaatttttgtaattttagtagagattgggtttcatcatgttggccaggctggtctcaaacccctagcctcaagtgatccccccaccttggcctcctagagtgctgggactacaggcatgaaccaccatgtccgcctgatttgttgtctttcattaacgtttatatctacctgctatataggtgtgccagtttacgtcttttttccttcttagcagctcccagctgctccacaagagcactgagacctggggcagttgggtgatagttactccatttttcttctactctagttagatggtgttcaaatttcgttcacacagagataactgctctcttgctttgaattgtataaagtcagaaaagaggtgtgaccatgtgaatacacaggaagtgttgtctttcatcattattttagtcaacaaaatagaattttcttggtttcctaaacttaccgagtccagtgatgtaaaccccaaatgttttcgttcaactttttattgacacagaagaattcagcttgatacatttacacaaactaaacacactcagtaaccagcattcaaaaggaaaaaatagatcactgccaacatcatcaaattgatcatttctgggctcagaatccgccaccatggcccctctcagccactgcctcctctgggcaactaccagccccacttctaacagcgtggattagtttgagccacataactgagctccaggtaattgataagtgaaacaaaatttaatatttttaaaagaaagggacctaggaactcatataaaccttggggatgggcgatccagggtaagacaagtagagtagagccaaagcagtgttttttctttcacaattgctgaagcaaacagtgacattacaacagtgagtcacatgccaagagtgacagaggaccccagtgtacctgtggagaaaatcatagttaatagaaatgcacacagaactgccgcgtcacaaaggttctgtgcttgtgtgatttttttttcttttcttttttttttttttgagatggagtcttgctctgtcaccaggctggagtgcagtggcatgatctcagctcactgcaaccattgcctcccgggttcaagtgattctcctgcctcagcctcccaagtagctgggactacaggcgcccaccaccatgcccagctaatttttatatttttagtagagacggggtttcaccatgttggccagaatggtctcgatctcttgaccttgtgatccacctgccttggcctcccaaagtgctgggattacaggcatgagccaccacgcctggcggcttgcgagaatgtttaatatttgctttctgactttcaaggtgtcttttgttgcgtgtgtgtgtttgtgtgtgtgtgttctgctgctttacagattaaattgtgagcacctttctggggtgagatgtcctgaactcccttttccagttgtcacataggatcgggggagaccctgttgggtgatctggaagagccagggcagaaattggccaaggtgacggtgcttggaagaattgtggtcagcctgatggataccttaaacgttctatgtattgtgtcttctttgacggggttgtcctatggaaatagactgtgtgtcctcaatggactctaacaggtccaccagccagaacagaccttaaaatatgactgtgtctgtgtccttgattatactcaagtcatgggttagtgtcaggaaacaaaatgtgaggtagttaatattctcaagtgaatttttttttttttttttttgagacagagtctccctctgtcacctgggctggagtgcagtggtgcaacctccacctcccaggttcaagcaattctcctgcctcagcctcttgagtagttgggactacaggcatgcacaaccatgcctgggtaatttttgtatttttagtagagatggggtttcatcatgttggctaggctggtcttgaactcctgacctcaggtgatccccccgcctcagcctcccaaagtgctgggattacaggcatgagccaccgcacctagccctcaggtgaaaatttaaacttacttgcaacattttctgatttctaaaattattcaaattttataagagaaacatgtttgctgtttttctttataaaagtcattttactccacagcgtgaaagaacattttgtagaacttggcataaaagaaattgctgagtcatttagttgttttctcttaaagaattaaaaatgctttacatatgtcactttatattctaagtagtcccatgagatgcgtgtttaaatgggacacataatttattaaatgtcagtagtaaaatggaaccgaatttttattatatacagttactaattttgcactaagaaaataatgccttttattgaggagcatttgtgggactttgctcttgccctgcagagaaaattcggtgactctcttttggggaaatttgctttccaaaccatattttcactctttataaaatcttttggctgagtgtggtagctcatgcctgtaattccagcactttgggaggccaaggcaggagagcttttgagctcaggagtttgagaccagcctgggccacatagggagaccctgtctctacaaaaaataaaaaattagctgggtgtggtggtgcatgcttgtagtcccagctactcaggaggctgaggctggagaattgcatgagaccaggaagtcaaggctgtggtgagccatgatcgtaccactgcactccagcctgggtgacagaatgagaccctgtcttaaaaaaaaaaaaaaaaaaaaaagatctctcatttagtacagtttgggtgtctgtagaaggagctgtttactttgtctgcatgattgttagttgacagatttcttgatctttgtttcagtttcagggtacctgcagaatacagacattttgagttaagaaaaccacacgtctatcttcaaaattgagattaccctctatatttcatttttcataattgcacagaaaacacctattttcctgtattacagtcttagcttttctgttcctattagcttcatggcctaagtaacattcctatgattattttgcaacaaagtggggaggctaaaaagtaaagtgattacttgttaaacaaatatagtgcaacttatgcagacaaacaagtgttacctccttcagaacagacccctcagaatccaatatcttaattctaacaagcctgcgtcagaggctagggccttgactatgagaggagttaaaagtaacttggaaccaaacctgataaataaggggtgagcaacttacatggggaagggaactggcatttcttgagcttccataataggaattgtgtttatgggaatggccctgtaagaaggagactactgtctctgtgttatagctgggcagtttcagagaagtaaatggcctgcacaagttcacataactagtgagtgggtccttctccaggtctccaaaagtgatttatgctttcttccatattatgatgattattttatttactgtttttttctaactgtgttagaaaaatgtgtctttaatatcatagaacaatttttttggtctggtttataaatcgatcctaaatacaaatgaacaagaggaaataaacattttgaagaatgtcatcattattgaaatgaacaacttcttggaaggaacaccctaatatagatgtctatgttctattcatgtatgtgggaaaacaagtgtttgggattatgcgtcatacgtgataaatgacatcacccaattttccaaattatatgacttgaatttcacactggatgtttcaaaaatttgttgattaacttattggatagtgactcactcattcacatgttatagaagtgactttaggaatgttaacttgattatttttggttagagctaaaaacacttgctgccataaggttgttctttcataggcaaataactgtgctgacattggaggcaggaaggataagaccaccaggcaactgtaaaactaggagctgagtcaccctgtgagggtctggcatcaggtcggaggccactcagattagagggagttctgggtggcacagaacttggtgcaggtgttttttttaaagtttttaaggaattagaattttgttagtaatgttcctctactaagagtatcagcatcgacacttaagaaaagatgggggaaaaaatagggagtatcagcatagaatttctgagatgtaaaaaataaaacattttcggctgggcacagtggctcacggctgtaatcccagcactttgggaggccaaggcaggtggctcacctgaggtcaggagttcgcgaccagtctgactaacagggtgaaaccctgtctctactaaatacaaaaaaaaaaattagccaagtgtgctggtgcatgcctgtaatccgaactacttgggaggctgagaccggagaatcgcttgaacctgggaggcggaggttgcggtgagccaagatcgtgccattgcactccagcctgggcaacaagagtgaaacttcatctcaaaaaaaaaaaaagttagctgggtgtggtggcaagctcctttaatcctagctactcgggagctgaggccggagaatcacttgaatccggaaggcggaggttgcagtgagccgagatcgcaccattgcactccagcctgggtgacaagagtgaaactccatctcaaaataaataaataaatcaataaatagaaacaaaacactttcataagtccaagacaactttttgcttttatgttttatgacttttccacctaacttatttaaaaattttgatatcattaaaaaaatacatttgtggcatccaaaatatgtaaatgtaccacttacattccacataattcttggtacatgtaggtactcaacaaatgttttctgaactgaattgaactcagaaatttttaaagcatgttgaatatgctatatgtaattttgtagtctttttttatttgggggtgggggggcgggatggagtcttgctctgtcacccaggctggagtgcagtggtgcagtcttggctcactgcaacctccaactcctgggttcaagcaattctcctgcctcagcctactgagtagctgggactacaagcatgcgccaccatgcccagcctatttttgtatttttagtggagatggggtttcaccatattggtaaggctggtcttgaactcctgacctcaagtgatccacctgcctcggcctcccaaagtgctgggattgcaggcatgagccactgcgcccggccaattttgtagtcttttatacagataatatctgtttgctagcatgggtaaactgttttactcaagtatggtaatagcacagcagagtagttaatacaatatgattaagaaaaacaattaaaaagtgctttatgtatacatatatcacattatgtaagatgggccagtgagttggtagaatcaggaagccaagatgaaggcaggcagataggccttgtgctcttctggaagggttgtggccagctctgaggtaagtgttatttgagacgcagaaagtcattccagttatttaaaaaaatctctttccagaaaccgaaagttccagcatctcccaccagagaggaggattcctgcttttcctttcctaagcccccagtggaccctgcgaagattagaagagtaagcaacgccagggctcgcttattcagggctgcctcccagcgggcccttctgccggacagatcccttcctccctccgactgtaaggccatgtaacatcctgtaatctctggggacaggcatgcttcttgaatttgcacacaaaagctaattttatatgatttttcctaaccctggatgatttttatattaactaagattagttaatattgggcaaaagctggctaagaaacattgttcatatatttttctgggtgcttataaggaatacctaaatattacagttggtaggaaaaggaaattaggataagtgactgggcgcggtggctcatgcctgtaatcccagcactttgggaggccaaagcggccagatcacctgagatgaggagttcgagaccagcctggccaacatggtaaaaccctgtctctactaaaaatacaaaacttagctgggtgtggtggcacgtgcctgtaatcccagctactcgggaggctgaggcaggagaagtgcttgaaaccaggaggtggaggttgcagtgagctgagatcgtgccactgcaccccagcgtgggtgacgagcaagactgtctcaacaaaaaagaaaaaaaagaatattaggataagtattccctagtggatggttcatgtatattagaaataaatgatttttaaattagagttcaaaaagttgttaattttattagaaattaatgaaaatgataagattcttataatgcacattaagcttatttctttgagaatgcccttctgatcccgtgtgagcatgtaagcaaaatttgaatgggacttctactgcctgagaattgctgccaggcacctaaacctgggaacagagaggctaaagatcacagcctgaggagtcccaccaacaattggaatcactccccatccagggcatactaagggtttctcaaactgtggaaaaggacccagaagtgggatgacaatcaatttagtggatcacaccagcatttttaaaaaatgaagtagaatagaatataatagaaaatgtcagaatacatgacacacgataggggtaagtattgcttcaagagactttacttcggtcttcagtgtgtgttcagggtcatattacaaactgatttctgactgtgtgtggtcaaaaaaagtggaaaccactttaccaggagctgacagaactggttctccctccatcaacaagatttgatgaagagagataggcttacagtcacagagaattggggagagcctggaagatacataccaaagatcacagcccccacctgagcatcatacttgacagacaagtatttttttttaattcatttccaacatttaaaaggtagaagaatctcatggaagaatccagatttatgacttcttgtgaaaaatcagaaaatctggcaacactgggtccccattccatgcagccacaatggggcatgatcggagctgagtggtacctccattctgtggccaggatatgatctgcagtcaccatgtccccagcctgtgccattcacttgcctgtgtggtccctgatgtggctgaagagttagaataaaggagaaaaagaaagaaagagagagagaaagagagagacagaaagagaaaggaaggtaggaaggaaggaaggaagagagggaaggagagagggaaggaggaaaggaaagaaaaaaggaaagaaggaaagaaaaagaagagagggagggaggaaggaaggaagaaaagagaagagaaaagacaagacaatgaggatgtgcagggtgtgtacctcatgctgtgatgccatgaccaagtagatcatcaggcaacttgctttaccttgatgtcccgatttgtttcctttcttacactgccagtcgatctgatatttatcaaactcctactaagtgccaggcaccattctaggccaacaaagttctgtcctcagagagcttacaatctagtgagaggagatagacaatgacaggagaacaaataagtaagagaatttgagtgctgatgaatgctctgaagaagataaacaagataatggactcgagagtgactgtggtggggtaatttgctttagctcaggtggctctgaaaggtatctttgaggagctggcagctgaataggaaggtgcctcatgagaaggaggcagccatgtaaaaatccatggaccaagtgtccacatggaaggaaaagcgagtgcaatgaccgggcacgagagcaagtgctggtggtggaggacctggaggtccagtggctggaaagtggctgatcaagggaagttggagagagctgaggccacagaactgcccagggcctcagaatatggaaaacacacccagctgtgttttacttgtagtgaaaagatagggtttaccaaagggagagacaatgtgatgtaggttttttcaccaacagcagttctcagctgtagctgcccatgagaatcacctgaggagcttttcaaacgctccccccgcaacccgagtcccgtgtcagctcaggtaaatcagaaagggttggtaattgcaggaacaaagggtttgccaagatgagaggggctgggacctggaggtgaagggcacttcttatgaacaggatggcaggattggtgcaaggactcataccttgttttttattctgtgttcttgcttgtgaggttgaatactgtgtgtttcatgtatttttaacttttgggagtgcatgctagaaaaccctgctgcttgctgaggtacacactgatgtgaaagtgaccacagagatgaatgctttgcccaccatccccctcctcagtgcttccccagtggcttagctccttccccgctggggtacctgcctgttgtctgcatgctctgggaggtgccctctgcagctgtgatttcccagcactgaggccagcttcacacctccaaggtgcactgaagcatgttttcatcgtggttcttttatccaccctgtttgcagtcacccctcttcaccattcaggtcatccctgaggtctgggccagcattcaggaaatactggcaacaaaaagtcattgttattttaaaagcacatgtcatccaattataaagttataaaaaatatttgagctctccagccttggaatcattgtcatttgtataagagctccctgggtttcatttcagatcttctctattgtttagaagaggtaggctttgtggagtaactgaggctgcagaaatggagggcatccctttgtttgctgtgaagtcatttgtggctgatgctaccccacaggcagggccggggtgtggtggcaggtttggaattcctgcttcaagacagtgaaagaggaagagatttgtgtagtcatctccaaaaggccagcagtataactgctttgcgttcacacagggtttttggctggaggtggcactgctgtgaatgcttccccagttattcaagccagacaagaggcctgagagcagtaccacctcctcagccatccctgtcacactctccgtcaccaagccctacacgtgcttcctgactagctctcgagtctgcattctccctcaccaccgccatgctgcctccatccctcttgcctcatcctgttttgctgctcttaaaccaccgtctgctcactggggtgctgtgatggtctgcaggtgggtggatgcgaggccctcagccagaggaacagccagtggagcctgaggatgctgagctcccaacacgacatggctgtgagcagcagccttatccctttatcccaggggaccatgaaaaatgatcattttctgtgtgttccataaagcacaagaggtcgggaagcaaataaagatcagattgcaccaccctcttgctgaaaacccttcagaggccctgttgtgcctacagaagtgtttgccaaactgagttccagggaactccagggaacacttttggcaaaatgttaatagcttctctttggaaaaagggttcagtgctcaaataggtcagggaaacactgcctacccctcatcttcttggagagtctctgcacatgagcgtattaaagtgttggtggagaaatctgtttaattttaattcaacacagcatttcacaaacctgctggactgtgggatctgtcttttgggaacacaatttgggaaacactagcctactgtagaagttggcaaactttttctgtaaagggccagatagtcaatattttagacctggtccttatggtctctgctcagcctcctccgttttgtattgtagcatggaagcagccatccaccaatttatggccactgaaacttgaatttcatgtaattttcacttgtcacaaaatattgttctttctttgattttttttctaaccatttaaaaatacaaaaaccgttcttagtttgcaggctatacgaaaatgagatagggcagatttggtggggtttgtagtttgctgagctctggtgggggtggcgggggatgacatcccagcacctccaagtgcacagctgtgttgtgatccagccccagcgtaacattccaggccctgctcacgcctgtcctgggcctgccccctcacggtgggtgcaccggcagggtggaaccccttgttgttcaccacacccaccctgctgtttcaagcctcagggagaacctatgtaatttgctgggcccaatgctgaatggaaatgtggggccctttgttcaaaaattattaagagtttcaagatagccacagcagagccttaaaacaagtataggcccttctaaaactggggccctgcctgactgtactggcaatacacacttgaagctggctttcactccagacttttgttctcttttcttcaagctgtttacgtcttattaaccattcaaaatgcttctcagcccccacctcctctgtgaagctttctctgaccaactcccaacccctcaagctttctccactctctctgccccctccttacctggctggggtcacactgggcttcatttatctctttacacatctgccccctttgtctcccctgctagatagagcaacgtcattaagaaaagtgtttttctctgtttgttgcccaagagcctattacagggtgtggtatataacaggtatcaaataaatatttgtgaacctgaactggtcctgtgtggtaaggctgctgggagctgtctccttttgaagtttacccacgatccattacaaaattcatataatgtgctgcaactgtctaccgagaagatacagaccatagttacacatgctcagtttcatcgaggacattcatcaggaatgagagtgagccccccagggcagctcttcgttgtagtaatacctgacaagcttactccagtagatttgaagatagacaggtatagctccttgacctataggtatggttgggtttcccttctagaagctccatgatggctgggacttgttcaccatggcttcacccgtgcagtaaacagcacctggcacatagtcgtgggtgcttaataaatattcagggagtgaatgaatgagagaaacgaatgctaaaagataacggtaggctaaaaatactttgtaatcggaaacagaatgtgtgcttcataattcagtagtaaagtcatttaaggtggtgtggtgatatggagagagccctagcccagaagtcaggattcttgggttccaataatcatgacaataacttctaggttttgagcgtgctagcaccatgtaagtcactttactaggccacatcatttaaaatctcaccacatccccaagaggtggggaccatggaaggtggtgtgaattgagcatccacatcacagagtgggtgccccggggggcctgcactcgaacccaagtctgagccaaagcctgtgttcttcccaccctgtggtcctggctctccctgtgaccttagacaggacatttaatctttgggttctcaattttctcatcttaaaaaaaaaaaaaagaagcctagaatctctaaggttcctttcagttttaaaatttagcgttttgaaagcagggagtttggtcagaggggtagaataggtggttttgttattattagtttttattggtttgttggtttcttagtaagtacagaaaaggaaaggaaaccttgagtcattttgaaaaatcttgcaaaacagtaagtatttttctacatgcagctcatccccacccccgcacactgtattatgggagatttactctcttcccctttaacaaaatgttttctcacagactacagccttgtagcagcatggacaataagctattcctaataccaatttgctgataagggaaatgttatattattatatgtctaagaatctgcagtcatgagcaaaaaggatatcttcttgcaactctgtcttatacctctttagaggtatgtttcaatgccctctcctttccattgcagagtagtgtggtctactaggctgggcctccacaatccacccctcacccctctaatcacctctcctcctctttgcctccttgcacactgcattcctgctattccttgagcaccccaggcacagtgggtgctgaagagtcccccacttcagcctaccttagagcctccataccagctggtctctgtgctgaaaatactggccctggtggctggatgcctcactccataaagggtttgtcctccctaccctgctgtacccaccctattcccaatccccttgagccttccctacttttatactttgctttttttccatagcacttattatcttataacatgtcgtataccttatttattatggttattgcttattttctgttgattaggttgtaagccctgtgagatcagagatctattttgatgcacaccaagtacctaggacagtgtttgacatgggggagccactcagtaaatattttttgaatgaaaaattatgtgatcaaattcaggaggaagagctgctgttatgggacacggaagtacttatgtggactaggtagtttatgagcctgaagttgcgtgtttgccttcaagtagactctaagctggtagagataagattctatacatttttacctgcagaattgatggtgccagacttaagatactggtcttgtgtatgctcagaaaggctttggccataaaattccagacttaattataagcaatgtataacttttaaatcatataaattcttagattgaaaaataacattgaaaggtagtgattcctaaaataagaatacttcaacaaaatattttcttggttatattgcagcaaagaagacagtggaatccaaagaaacagttatgatgggggactctatggtgaaaataaatgggatttatttaacaaaatcaaatgctatttgccacttaaagagtcacccacttcagctaactgatgatggaggcttcagtgaaataaaggagcaagaaatgttcaaaggaacaacatctttaccatctcatctcaagaatggagggtcagtattctttttatttaattttctggtcaggataatggtatcatttaccagtttcttctctattttatatagatgattggtttgctttttctcttttatgtaagcaaattttatgttaagggtacatgaataggagagactacttctcatggccaaatggagttgatttttgtatcattccttatataatactcaagaacacttttattcatgactgtcaaagtgctgcttctgtaggactatcagaataagatttagttggactattccagccatcccttgagtgatgactgatcattccgtttgtatgttatttgggattcttgcatggcctggaatctcctattatctccctttgggttagttcacagtccttaactccacaagagtggacacttattttattcttcagtagatcttggattaaatatttattttgcaaactaatggctaaaacagaagagtcctgtagatttcagttatctgtgagatccctccattggcccctcataaatgaatgattgggaattgctttatttcataccatgttcctagatagggtttccttgagaatcaatcttcctaccatattaaggatctgtggagaaatgcttgctgtttggactgtgaattcttaccctggtattttactgaagaaaccttgagtatttggtggctggaatgggggaaacagtggagagaacaggctctgttttccagtcccagccagtaatgatgctaagagaggcagaatgtcttgaactggacaaggtcactcagtttaagatatttttttctaggactttccattgggtcatcatggataactgcccggttcagatttgcttaacaagattaaattccatgggccattttaagatcaagtatttcttacactcacgttagatttcgggtctgactttggcttggacacatgtagcatgcttaaaacttttcccccaagtggctgcttgccagcttgtttagctgaaccgaccttgtctgctgacacagcctgaagagtgtcacacatacggaatttatattaagcaatctagtagtccttgtaatgtcatttcacattcagaacatttttttaaattaaaggaaaaatgaaatgtctccttaagtggaagagaacgacttcaaattgggactttgggagttgagtagaaaacatcaaactggccattgcagacaaatcgtttccagttggtgaataagaataggctgtggacctcagagcttaaacataaaaggcagcaggaaaacttgtgtttctttcagtactgaagtaaaaaggaaacatttatcttgctgcatccatccttacagtaatgaaagttgactagaaaaaccagacaagagctatttaatttgtttatttgcaaaccttcagatgtggcagaataatctggaaagccagagttcattatgtcttcctcattctgggacagcaggggcattttcatttatatattttatcccacaaacagcaaaagacaaatcagttagcacttcttcctcactgtccaaaattatgaggcattggcaatagcactaattgttttctttgtgttttgttaggacggcttttgcatcatataaggattgtgtctaagttgggtttgcaatgtaccctggcaaggttaactttcagtaacattttttgctttatgaatctttacctcctttaatcgttgggtggaattttattggagtggtgccaaaaaaaagtttacgtagtaggattaaaataaaccaaaaaacagaaactcttagcaattctttcattaatgatgttaatgaatcagtctgggacacttgataattgtttcttgtaaacatttaagtgactaattccaagaaatgatctttgctatgcagtggagtattcccagttttgatggtagagcccttccctcaattaacattttttcatctttagaccataaagtggcaattgtcagtgagctgggctggcaggagcagggagggttgagaaggagtgtgtaagtagaccgtggaaaggggagagagtgggtgaggccacactcccagtgtgggggccttgcaggcttgtccagtgtgacagcggtcacctgtgtggtgtgtgtttatctggctgggagaggaaggagcattttgtttccatgaaactgcaataattgtataccctcatttataatatggataattcagatattgatggaatatctgaatatggatggaatggagttcaactttatgctggttatggtggaaaaaggatttgctaaacaaagtatcattgtaaacaatgctttagaggactatttaactttacaaaagagaacacactgtcaagcacttacggaactgtcatcctcaaaccttgtgtcagttatgatagtctccatatgcccatttagggattcatttaaggtctggcagacttgctcctcaggaatacttcaccatcacttgctttgtattactatatggattgaaagtaatgcagctgccattaacaaaatgtgtgtattctccatccatccatccacccattcacccatctacctatccagccatcgacatatctacccatacatccacccagacacccattcatccacccatccaactgtccattcatccatccatccacatacccatccacctgtccatctacccattcacccatctactcatccactcatctgcccatccacccacccatccgtctacctacccacccatctgtcatccacccatccattcatccatccatccatccatccgctcatctatatatctacccatctatccacccattcacccatccacccacctatccacctatccatctgtctacccatccacccatccatatatctccccatccatccacccattcacccatccatccacctgtctacccatccattcatccatccatctatccatccatctacccatccacccatccatatatctacccatctgtctacccatgcagctagcacctacccatccacctatccacccatccattcatccatccatatacccatctacccattcatccacccatccacctatccatgcacccattcacccatcccccatccatccacccatttatccattcatccatctattcattaacctatccacccacccatctacccatctatccatccacccacccacccacccacccacgcagtcatccatctatctattcacccacctgttcgtccatccatccatccatccatccatccatggaatctctttcaaagcagatgaatctctttacctgcttaaaaaatctgttaaggctttccatgtaaacgttcaaactatcatggtttggaaatgggatctttaggaggaaagcccaagaacagccagttgttatggagaatcagggactgttcctgaggagccagaatctctggatttaggtttggttctctctcagccacttgatttagctgtatttggcaagtatcttaacactttcaggggctcagttttctaatgtataaaatggaaataactctgctcttttactcccatctccttctagccctcactgtagattgtggaatgatgactaaggcttgaaagccttactaataaactatcgagtgctcttagtattgttggaatcaaaaataagaaaagagggcttctggttaaaggcacaaaggcattctccagtaatccaatgaaagcagcaaagaatgaaaaacagagaagtaaatttcatcaatgaaacaacaacaaaaaaatggctacgaccctgaactacacaacatgaagcaaactttacactgcagtataggcttgatttttgttggtctgtctagcaaacaggccttctcacattgtgtaataaatgctgctcagtccgtatttggagaagggttagccctgtcttccctgtgtccctcccaggggtggttatgtggcccagggctggctaatcagagtttgccaaccccagctacagcagttgattcagagatgggcacatgatccaagccaggccagttgcattccttcatgggactttcaccaaggcctttggggaaagtgctctttctccaggttcacaaactataaagatgatgtggtcttggagctgacagtggccttttcacagccttatggagagagatgctgagagggaagtggtacataaacaaaaagagcaaggaacgaagataatgatcaagttcgaggatgacatataaacctctagatccagctgtgcctgaagccaccacatcaacattgtagaatactgttttgtgaaccaatgtgttcctttttctttctccttccttcctttctttttcttctctccttccttccttcccccttccctctccctcttctccttccttccttccccctttccgttcccttccctctccttccttccttcctctctctttctttcttcctgtgttcccttttctcttttctccctccttccttccttcctttttttctcttttttttctttttttgacagagtctagctctattgtcaggatggagtgcagtggcacaatcttggctcactgcaacctccgcctccctggttcaagcgattctcctgcctcagcctgccctgtagctgggattacaggcatgtgccaccacgccaagctaatttttgtatttttagtagagatggggtttcaccatgttggccaggatggtcttgatctcctgaccttgtgatctgcccacctcagcctcccaaagtactgagattacaggcgtgagccaccgtggctggcttgctttcttttctttttcttttttttttctttctttctttctttgtttctttctttcctttcttttctttctttctgtctttctctttctttttcttttctttcttctttcttttcttctctccctcccctcccctcccctccccttccttccttccttccttcactccttccttccttccttccaacagggacggtttatggtactttagattaggttttgttacttggaacattgcattcataagaatctagttaaccttccaggccctaagaaatctagattataacaaggggtaatttgaaagtggacacataccttctcagaccttgagcaagaaacagatttcactaaaagtgagtcttttaattcagaaagatgtactcaatatttaattaaagatatgagatctaacgatgtaggcaggctgcgggagcagggagtatgccctgtgtaaggactccattcaagatccagatcaagaagtgagggggaagatggagctgaggatgacacacactcctggttacatgtgagccagctagtttgtgtatgtgtgtgttttgggggaggggcttgatacattagaatttaaggaacccagcatgtgaaagggcttttgtgtgcatcacagcgacctgctccacacaaaccaagggaacatatactcccaggtcagcaaaggtaatggatttggtgattgcaagtttaagaaaacagactaaaatttaagctacagaatacctccgttcgctctctctatggatccttattcagcgttaataaataaatggctctgtttaaagataaatactattaagataggaaccaacgtgggacttgagcttagatatataaggaacatagcaaaaaaaagatgaaggaagtggatcacagaaggtattaccttccaaaaacatggaaagagttcaaacaattttccatagtctcagagaaattatagataatgtgatcattctcttaaaaaaaaaaaagaaagggttcaggcatggtggctcacgcctgtaatcccaacactttgggaggccgaggcgggcagatcatgaggtcaggagatcaagaccatcctggctaacatggtgaaaccctgtctctactaaaaatacaaaaaaaaattagctgggcatagtgacaggcacctgtagtcccagctactcgggaggttgaggcaggagaatggcgtgaacccgggaggcagagctttcagtgagccgagatcatgccactgcactccagcctaggcgatggagtgagactccctctcaaaaaaaaaaaaaaaggaaaaaagcactgttctttgggttataagaatttaaatgagagattctaagcccatataaggagatgaaaaataagcttacagtacgcaaaaaagaaatgaaagaaaaatgtatcaagaggaaagctacattaggaataaaaaattagaataaaacaggtgaaaatacagtaggacatggtggacaggctagaagaaatcttacaaaaagaaatgaataataaagctatgaaaatgattattgagatagatatggaagaatgaaacttgttttcctgaagaagataattatcttccttcacttcctctgctaacgctgtcttactgtgaattgtcagacacttttctaagtcctttgcgtatattaagtcatttaatattcacaacaactcatgaagaatggaagagatcagagcagaaagaagaaaaatattaagacataacagaagaaaactttctgaaacaaatacttaaatctgaagctcaaatggacacatggtattccaagaaaaatttgatatggaataatccatactaagacatttccaccagtgctcagcactagaacactacccagtacatagtacgcactcagtgaataattgttgattgggcgggcaaatggaagaaagtttcatatggctctcccggctgaatgaacaagtcacataaaaggagaagaagacaggctggcttctggttttcttaaagaatcactcagtgccagaaggcagtaatgtctatgaagtcctaagtgtaataaggggtaactgaagaattgtattgccagtccagttgtacagaagcaacagatagacactttcaatatgaatgaactgagggaatatactactcatgcactttccagaaaacctgtagacaacaaaatgatgagtcaaaattcaaaacctagaaatgaagaagctatggtaaaagcattcatggtgagtacagtaatgattttgttttcgtattggattaaaactaaacaactctgcttatggaacagaaaccttgacaatgtggtagtaatataaataaccaaaaccagtacttgggaggaagtgtgagtactgatttctttactttcataatggggaatagatttgtcagtagctaaagtctgaaattgcaatatatagttgaaaaaataatgatttcagcatcctaatgtttttcattacttttttcttaactttagagagatcttttagaaactattctctctttgtgaagacccattcatctgaagttctacaattccttcagtttcacctcaatttctgtttctttgttaagttcaagcaaagtttatacttaatgctttttcactacaataacatgtatggtatgattccatttatatgtatccatttacctgccctccctcctgcccttctgttctttcattcttctatcttttcctctgaacatctgcagaaatatgtctggaatgatgttgaccacatattatgatgtttatttctgggtggtgggatcctggataatttttttaaaatcttctttgtactttattatattgcctggcttttaaaaaataataaatatatcattttttcaaaaacaatgaagtcattattcttttaagattttaagagcaatgtggctgagaaactttccatttggaaaagacaaagacattggcctgattttgtagagaccctcctttctgtccgataagcgtttcctggtaagcaatgccctgtgctgaggggttgagagatagaagagtggaccctgtccatgaagagcttaccagcgtgtcaggccttgcttctcaagtatggtccctggaccagcagcatcagcatcccctgggagcctgttagaaatgtaagtccccagacttaccaaattagaatctgcatttttataagatctccaagtgctttgaatgcacacacaaggtctagaagcactgttcaaagatgaactcaaatgctggaggaaagaaaggggaactgaaagaaggtatactgaaaatttagaggtcagagcagctaattctgacttgaggatcaagggaaaattcctagagtagttgggatttgggggtgcattttgaaggttgattttcgtgagggatggagcactgtgttcttggctaaaggaggagcataagccagaagtgggatttgacgtggcagtggcaggaggcatcctgaggctgcaagccatagcgctgagcagcatgtctggaagggaagttagggacacatgacagatggccttcaatgctactcccaggtatgtgggtccattgtttaaataaaggtgcaccactgagaggtgactttcgctgtcagttatgtgaaggacgaatggggagaggagagcctgggacaaaggaagccattgggaagctgttgtagcagttctggcgtaaggtgtgaagggagcacggcaccagggcattcagaatggaaagcagagatggaaccctgcatggcactggttaacacagtagcatgctgcagaagaggccagtcacagccactgctccctgtactgaacgaaatcctcacaggtacagcactgacaagttacaagggcttttcacatgcagtaccttgaaactgtggggctttgaatgttaaggggagtatgaaaccatgagcctttaagctaagggaatttaaggttaactaagttaagctaacatggatagctacaaagcaatatatctaatcgtgtatatatatatagaactttaataataaccagttagtgattattaaaaaaggtgccaaggggtgtgtgtgtgtgtgtgtgtgtgtatgtattttagtcttgtgcccaagccaacactattaagtaccttggaggactttcttaaaattttgatcttacagacatccctttaaaaccatgtcctttaatttcaagtgtttgtgtatagctgtttaagtagaatgctttaagtttagtaattaagaaaaagtgataatctggctggacacggtaactcacacctgtgatctcagcactttgggaggccgaggtcaggaattcaagaccagcatgcccaacatggtgaaatcacatttctaccaaaaatacaaaaaattagccaggtgtagtcccggctacttgggaggctggggcaggagaatcgcttgaacccaggaggcagaggttgcagtaagctgagattgcacccctgcactccagcctgggtgacagagtgagactctgtcgcaaaaaaaaaaagaaaagaaaagaaaagaaaaagtgataatctgtctggaaactgtatatctagtgctttaggctatgaaacatgctgaggggaccctccctccattgtccacccctctgttggcattaccaaattgcagtcgaagtatggaagagactataaagcaggatcagcaaactaaggcccatgagctaaatccagcccattgcctgtttttgtaaataaactgtattggaacacagccacactcatcttttacctattgtccatggccatcttcacactgcagcaagaattgagtacttatgacagaaactgtgtggccacaaagcctaaaacatttactacctgccttgatcctacacaacttgaatctagtttgaaaaacgaagtgtctttttcttatggcaaggataagtttagttcaaaagttgctaaattttctcttatccataagcatcctttacaatttccttacgtcattttttccaaaatggaaataaatttattgactttttaaacattccaaatccttctgtttaatctacttcttaatatttgtttagttattcctccaaagtaggaataaacaaactacagccagccaggtccggtggctcacgcctgtaatcccagcactttgggaggccaaggtgggcgaatcacctgtggttgggagttcgagacccgcttgtccaacatggtgaaaccccatctctactaaaaatccaaaaattagccgggtgtggtggctaattacaggcacatgcctgtaatcccaactacttttgggaggctgtgggaggagaatcacttgagcctgggaggtggaggttgcagtgagcagagatcacaccactgcactccagcctgggcgacagagcgatactcgtctcacaaacaaacaaacaaacaatataactacagcccaggagccaaatctggccatccatctggtttttgtttgttttgtttttcttttttacagcccttgagctaataatggtttatacacttttttaaatcattacattttaaatggttacaaatgtaaccatgtagtacctggattttcccacttggcccacaaagtgtgcaatatatattatctagctctttagggaaaaagcttgctgacctctgactaaagaaccttagtcataataattagaagaactgtcagaattatagcaaagtctgaattttatagttttttttttgtttgtttgttttgtttttttttttgagacagagcctcactctgttgcccaggctagagtgcagtggtgtgtggtgtgatcttggctcactgcaacctccgcctcccaggttcaagcaattctcttgcctcaacctcccgagtagctgggattataggtacacgccaccacccccagctaatttttgtatttttagtagagatgtggttttgccatgttggccaggctggctggtcttgaactcctgacctcaagtgatctgccttcctaagcctcccaaagtgctgtggttacagatgtgagccaccatgcctggctaattttatagtatttttaaagaaatatacttgtatttctttggggtgcatgtggtccaaaagtagatattgtccacatgattgactcatggatgggcagtggtaactcaagtcagtccgtgtgtagcagtgccatagccacagattggttctggctgttcagagtgaaatgtaggaccctcctcactgattgcaagagaagactttgcttttgctcttaaacatgtgggctgaggagaggcctgggaatgccagacccattttgctttaatcagaactccaacctggttacagctggaactgagggaagggcagagctgagagaatcgcagaaagatgccgccaaaggcctgattgcaccatgcctaaaacccaccctacctgtccacattcaggttatgtgagtcaataaattgcatttattgtttaaatccattgaaattaggtttttgttatttgtcgatcaagatatcataaagaacaaaacagtgccaatctgcctgtacgaagaatttcacagaggagctttaagaaataacttctgaaattatttttggtacatgaaaaatcattgcaaaaaatttaattacagtctttaataatatggaacaggaaactaggaagaacaattttgctggatgactgaatcaagatccaaaaacatctgataggcaggaatgctttgccaaatgcggcactgtggaatttaggaagaacaagcaaaggcccaacctggatgggaaaatctgccttagtgaacatgcaggaaaagattagagacacccaccactgtgacgtgaccaccaaaccgctaatgtcattttaggctgcagcgttacgtagaacatctcctctctgtcctcaagccatactacctttggctgagtgctgggttccagactttaaaagggatccagacaagcgaacactcactttgagtaactgattgtcctggaagagatttgaaaccgcatcatgtgaggaacagtagaagggactggaggagtttgctgatgacatcagtgatgaccacagccataatagtaaacatgtattagttaccatgtgcctggaactgtgccaagcaatcgcacatcctatcatttagtcctcacaacagtctcacattgggggatagtgttatttaccacacctttctacagatgaggaaaccaaaacttacccgaggtcacacggctgtaagtggtcggaccatgggatttaaaccataggagatgactttatgtggggaatgcaacatctttaaatatgtgcaggattatcaaggagaaaaagaataaagatttgtttcatgcagttccaattagtagaacgaagaccaatgagcagaatttacagagaaacagatttcttttgagtacataagtccatctattcttccttttctccttaacggagtgattttcttttcttgatgcctctcttccccattcagtcttactgtgggacttcagctctatggctgtgtggaaaccctggtaggcttcccctgctatcctattcctccatggctacattctgttatttcctctgcctgaaatcctgtcaacccttgacttacggaacctcttgaatgtgttccttcttctccaattccactgtcaccctcagattagtccttgttccttctctccaagtctcctaaatactcttgacattgcacacccccaaatcgcatcacttccttgtataagaacccatgacagttccttattgcctgtcaaatcagattcatttactcagcccatagtgtgggttgagtaaacccatggaaaccttctatgactgtcttacttgccctgggcacttatcccctgccctcagtatcagtctgcttatgcctgtctttattttcactcatgctattccccttctgagagtagtgttgtcatttgctggtttaacttttattcttttattattattattttttgaggcagagtcttgctctttcacccaggctggagtgaagtgtgcaatctcggctcattgcaacttctgccccctgggttcaagcgattctcctgcctcagcctcctgagtagctggaattacaggcgcccgccaccatgcctggctaatttttgtatttttagtagagatggagtttcaccatattggccagactggtctcgaactcctgacctcaggcgatccgcctgcctcggcctcccaaagtgctgggattacaggtgtgacccactgcgccctgcctgttattatttttgagacagggtctcactctgtcacccaagctggaatgcaatggcacaatcacagctcactgcagcctcgaccttctgggctcaagcgatcctcctgcctcagcctccaaagtggccgggactacaggtgtgtgccaccatgctagatagttttaaaattttttttagagggaaagtcttgccatattgcccaggctggtcttgaactccttgaactcctaggtgcaagtgatcgtctcacctaggcctcccaaagtggtggcattacagtcgtgagccaccatgccggccaacttttattcttttaaggcccattttgtagtccacttctcccactcactaatcacttccttcttagcaccctctagttcttacaatctgttgaatttcacattctagtactttattaacaactctattggacttttccattaaaaaacagtggttccgggccgggcgcggtggctcacgcctgtaatcccagcactttgggaggccgaggcgggcggatcacgaggtcaggagatcgagaccatcccggctaaaacggtgaaaccccgtctctactaaaaatacaaaaaaaattagccgggcgtagtggcgggcgcctgtagtcccagctacttgggaggctgaggcaggagaatggcgtgaacccgggaggcggagcttgcagtgagccgagatcccgccactgcactccagcctgggtgacagagcgagactccgtctcaaaaaaaaaaaaaaaaaaaaaaaaaaaaaaaaaaaaaaaacagtggtttcttagttcctcagagtagattttaaacttcatcagggcaatgccatgcacattctttagctcaataagatttgactctggactgcttagacaagtgattactgactcataaggaaagagaaaattaatctgtttattaagttcttccagtgtcagtcagtgtactaagcagagtcattgcattcaatttaagatgaggaaaccaggctcagcgcagtggctcacacctgtaatcctagcaatttgggaggccgagatgggaggattgcttgaggccaggaattttagaccagcctggtcaacatagcaagctccccatctctatttaaaaaaaaaaattaatgatgaggaaaccaaagctaagtagttcacccaagatcacaatgctgataaaagttagacccaggacccaaactcaggcagcttggcttcagaacctacatatacccaccacaacgtaaggatcacgtagaacagcacttaataccagtcctgtgctctttttttatttctaacattattgttacttttttaaaattatattttaagttctgggatgcatgtgcagaaagtgcagtttcataggtatacatgtgccatggtggtttgctgcacccatcagcccatcgtctacattaggtatttctcctaatgctatccctcccctagccccccaccccccgacaggccccagtgtgtgatgtgcccctctctgtgttcatgtgttctcattgttcaactcccacttatgagtgagaacatgcagtgtttggttttctgttcttgtgtttgctgagaatgatggtttccagcttcatccatgtcactgcaaagtacacgaactcatccttttttatggccgcatactattccatggtgtatatgtgccacattttctttattcagcctatcattgatggacatttgggttggttccaagtttttgctattgtgaacagtgctgcaatatgcatacgtgtgcatgtgtcattatagtagaatgatttataatcctttgggtatatacccagtaatgggatcgctgggtcaaatggtatttctggttctagatccttgaggaattgccacactgtcttccacaatggttgaactaatttacactcccaccaacagtgtaaaagcattcctatttctccacatcctctccagcatttactgtttcctgactttttaatgattgccattctacctggagtgagatgatatctcattgtggttttgatttgcatttctctaatgaccagtgatgatgagctttttaaaatatatttgttggccgcataaatgtcttcttttgagaagtgtctgttcatatccttcatccactttttgatggaatttttttttcttgtaaatttgtttagttctttgtagattctggatattagccctttgtcagatggatagactgcaaacattttctcctattctgtaggttgcttgttcactctgatgatagtttcttttgctgtgcagaagctctttagtttaattagatcccatttgtcaattttggcttttgttgccattgcttttgttgttttagtcatgaagtctttgcccatgcctatgtcctgaatggtattgcctaggttttcttctagggtttttatggttttaggtcttatgtttaagtctttaatccatcttgagttaattagttctgtgctctgcttgagaactgggagacccagcactgctaagcatttgcatataagaaggacacttcattttttcccctagaagtggggatacatgcgtgtggtatttatgtaggcaacctcatcactgaccatgacttgagggagagtggaccagtgactttggaagcccattagttgaaaagtatcttgcttgattttaatagttgtgtagggcaggtgtatgtattgaaagcaaggccttgtccctagtctcaaaccttcttgttatttctaggagtgataaatatgagaacttccttggctccacaccctgacaaacttggtattttacctttttgcaaggttgattcttttatttctgccttctttgagaggtccctgtccccgtagccattttcgattggctagtgacatttgctatcgtatttttattatgtacaaataaagcagttatttctgaatattaattagacaatttttggaaaattgacttcatctttttcctattttatgattaaaggaagtgttaagtgtttaaaaaaaaaatggggtggctggtgggcgccatggctcacacctgttatcccagcattttgggaggccgaggcaggcggatcacctgaggttgggagtttgagaccagcctgaccaacatggagaaaccccatctctactaaaaatacaaaattagccaggcatggtggcacacgcctgtaatcccagctactcgggaggctgaggcaggagaatcccttggacctgggaggcggaagttggggtgagccgagatcacgccattgcactccagcctgggcaacaagagtgaaactccatctcaaaaaaaaaaaaaaaaaaggtggggggaacatgttaatgaagtaaaaaatggtatttggagaagctaatcttcagggcggtaggaaaggccaagggctaagctgcaacatggcatagtcactggggggctcactacacaggaaggagaagccacgggcacatacagatgttcacagggactatcacatgtataagccttctttgtgagttttttggagcaactattatatttgatggacaaaaagaaattttgatataaaacttgcactcttcttttcctggtgtttttttaccttggaattttgtgcacatatttaaaagtaagtacttctaagtgtcagctctggctaaagagaagctgtatccttcagagatgttctctacattaaataaaactttttaaaaacctgagcatgtaatcctgctgttggccagccactgctcttttatttggaatacaaaatatttatcatctggggactgtccaaatttattttcagttttttaatgtttaaaatatttctaaaaataaatattgtcagagaatattaatttaattttaaaaatggaatcagggcacatttttatgtagtggaaagagaagcaaatttgtaaattatgagacctaagttccaaatctgtctttactgtgtgaccttgggcacatctggccagctgggacagtttctttatctgcagggatcggggaagggaggaagagagaaaaagagacagaggtctttcccagctcccaaaggctaagcttttgtaatccaagcatcccagagttctttcttattgtaacagtgaccccttgtggtatatatccttaaccaattttgttttgatttgcaaagtaaactggattttttgttctttctagtaactgtatttcatgttgttaggcaaatatgacttgttttaaaaagataaatcttaccgggaaatcaaaggtaaattaaagcagcatatagaggccaggggtggtggcccatgcctgtaatcccagcactttgggaggctgaggcgggcagatcgcctgaggtcaggagtttgagaacagcctggccaacatggcgaaacccccgtctctactaaaaatacaaaaattatccgggcatggtggcatgtgcctgtaatcccagctactggggaggctcaggcaggttgcagtgagctgagatcgcaccactgcactctagcctgagcaacagggcaagacttcgtctcaaaaacacaaaaacaaaaacaaaaaaaacccacatatagagcaccaaaccccatcttttaaacaattctcgatggtttcttcagaaactgtatatcggctggacacagtggctcactcctataatactagcattttgggaggctgaggcaggaggatcacttgagaccaggaatcaccagcctggacaacatagtgagaccctgtctctacaaaatattttttaaaaataaccaggcatagtggcatgtgcctgtagttctggctactcgggagcctggggtgggaggctcacttgtgccaaggagtttgaggctgcagtgagctatgatcacagcaccactgttctctagcctggatgacagagtgagacctatctcaaaataataaataagaaactgtatatagcagactcttgtcatttacaaaattagaagtgttttcatgtttgcgctgagtgttttatgtattcctcctagggaccaggggaagagacatgcgagggcctcatcatgccccagtagctcagacctgagcaggctgcaaaccaaagcaggtgaggggtccccacactccttcatctacagcatctccacttgaaggaaagatgtttgcactgaagatatctatgttggccactggaaacttaaggaagtttgtccaatttggtcacaaatcaacatttatttttatacatttttattatattcatacaatgttaccatcttaccactacccaactctgatgcctcaaacatctatagatgacagtcttttttttttttttttttttttttgagatggagtcttgctctgtcgcccaggctggagtgcagtggtgcaatctcggctcactgcaagctccacctcccaggttcatgccattctcctgcctcagcctcctgagtagctgggactacaggcgcccgccaccacgcctggctaattttttgtatttttagtagagacgagctttcattgttttagccaggatggtctcaatctcctgacctcgtgatccgcctgcctcagccttccaaagtgctgggattacaggggtgagccaccacgcccggcctagatgacagtcttaatggttttatagaaatcattttgtaaaagcatttggaaagttgcaaaacttgacattaacatagttcttgggttcaaagcttgagttcaaggcattgcttggctgggcatggtggctcacgcctgtaatcccagcactttgggagactgaggcaggcggatcacttgaggtcaggagttcaagaccagcctggccaacatcatgaaaccccatctctaccaaaaaaaaataataataatacaaaaattagctacgcatggtgggagggagtggggcacctgtaatcccaactacttgggaggctgaggcagcagaatcacttgaacccaggagatggagtttgcagtgagtctagaccacgccgctgcactccagcctgggcgacagagcgagactcatctcaaaaaaaaaaaaaaaaaaagataattgctcacttaaatgaaactatattaactttattaagaccgtcctttgggcctttaaagtgtttgagaaaatatataacaatataaaccacagtctagaaatgatacaaaatgtattcatgcaatagaatatagttgtcacaaaagtgaactcatgggcttttgtaatattgtaatattgagtaaattcagtacaaacataatatgagatgaaacaagttgcaaaagcaaagacatatattgtttatggatacacagccatgtggtaagcatgcgaagtcaagtgtagtcatagtaaccagtggatttaggatggtggtaacccctagagggagaggaggaggggaatggatgcagggagccacatatctgtaatgtttcatttctttaaaataagggaaaggataaaaatatggcaaaatgttaatatctgaccaaactagtgtggggtacactgatgtctgttatattcttcatatatttttgtacccatgagattttacaatactaaatagtagattttaaaaattcttatcttcaaaatttagttttttatcaataaaatgacttctgtgtcattgggaatttctttactcaggaaaatcttagatatactaatttctgagccagcatagttgctaaggattttacatttacgtgctaaaaacatcagccaatccaaacattgtgtcaggtttttgtgtccagaactcaaagctgtggttaacaactataaccactgagacagcaaaatcttcaaaaacatgctgaaatttttgcttgacttacccaatttcctgttgaatcataatgtttatatttagcaaactgtgaacctagatgaaagtgctttctaaaatattagattgttgcccaagattgaaacaaccttattattatttgtgtgtttgtgtgtatcttaaaaagcaattatatgattccatgcttcattttctagagtaactcagggattgtgtataaaatggaggcaggaggaggcccagcgtgaatgaagaggtggaaaggctgtagccagacacaactgtgccctttgaaattcctgggagagggttggaaggaaaccctcataccagtgactgagtaactttggttctgagaagaagcaaatctcagaaacattcagaagggcccgtaagggttaaataaattgttctgtgatttctgattcacccctataattcagctctttctggggtgaataagttatccattttatttgtcctgaaaaacaggttgatagtcatggtttctcatagaagttctctattaagcagcatattgcataggaggtaaaaaatgcagacttgaacttattggactcaaagtctggtttctagtaaatttaagtgtgttataaatatgtatcaattaaataactcgcctgacttattttctggctttcacttaccttgataatgttgattttattttattttttatatactttggactttgaataggttagttatccacaaatatgagcaagtatgttttttgtattacttgaatattcatgtttacttttagaatccatatccataaattatcaaagttaaggcagattcataaaaacaatgacccaaaagattgagatggtagtctacaaactatctgtagttccagaatccctgagcctgatgggaagtcagttagagtcttggttttgtgaatattcatatattttgctacagggtgctgccgcagaagaccctacaggggtggtacgtaatatgcaatgtgtataccatattgactttctaaaatccatatgttcctgcatcccacaccacatctgattccaaaggttttggataagggattgtgaatctgtactgatgtggactaatttgtcctaaagacaattcaatttagtatctgatggtgaagtcttgcattgggttagatagattatctgaaaccttgctattaaggctatttactgcactgcaaatgtttaataatagctttgttgacaacctctatttacttttgctgcttaggtgatcttggatgccctgtgtggctcagctgctcttggcagtgggaagggttgataaaaggcaagcctggacttgctgcaactgggagtggccatttctagcatgtagtataatgggaaggcctgtgtgttgggtgggataggtagattgcacagcgtccctgcttctcctgggtgacatcagcaccatttgatggtttgaggattcatgtcagaattcaaatacatctctgaattcaaatgaattcttaaatatatgccattatgtgttatctatggatttctctgctattttcacagataatcatcaagggactttattggatttcttgatgcagagaattttattttaatccatattaatattaaaaaatattaatatggatatttactaaggtattacacacattcaatatgtgttgtatatatttttctcttcaagaataataagaatgcattagaggcattggaaaatacagaagagcgcataaaagaaattaataatcctaatcccaatatttagagataaccattgttaccccattttacagaagagaggtaaagcaatttgcccatagtcaacgagctagtaggtggcagagctaggattcaaacccagatggtgactccaaacctgtgctattgataggccccctgctcaacttgtcctttgtgcaaagtaacctgaaaatacatgggccatatacccgtttgctcctctgtctgtctctgtctctctgtctttctctgtctcttctctctctctctcttccaacctctcaccttccgatccttcctgatttctaactctttgtgtgacatttttagggtccaggcatcttctgtgtggacacttaattggtaccaggtccaccctgccccgagagggcatggactccctgacttgatgtagaccaagtgccggataaaggacttaaggggtggtcttcagagaagagagactgaggaatacatctcaggactattcagtaatgcctcagcacagcaaagccacctctagctacagtcagtgttttagatcttgagatactgcctgtgtgaaatataatcataatttgcagtttctaatatgagttacatttccccccagtgttaccctttagtcggctagtttgctgcaagtcagcatagctttgaggtcaaatgcagaggctggggagttatatgaccccaggcagataacttaatacacctgggctccactttcttcacttgcaaaatggagacagtttgggaacctcctcatagtgttactgcaaaaatgaaatggaggcctcctgcatctagagtacacagtcaatggttgctattccctacaacccatattcacaggcagcatctactcttgatggcttggtagtatcacacaggcatgagatactgcaggggtgataacatgtttgtatacttgtttaatcagggaaatgaaattaattatatactgtatattgctaaaggcttggcactgagctcagagctttacctataccatgtcttttaattcttatacccttgaaggcaaatattctgttttgctgatgaggaaacagagactcaggaaggataagaaactggaccccatcactcaccatgtccatagtggagttgggatttgaattgagatttgtcagccccgaaggcccaggcttttctgctacaccacacaaaatcacttggcattaatgctactggccccatgttagtgtagacattttatttctatagaaaatgtccattttaggtctcccttttagaaaatttttcattacacatttttaaaatccttattctttatatatctatagttacctattctacattacagagggataagtttaagtaaaaatgtactcaaaactgtttgccttactgacagtcatcagtatttacaaagcttactactttatgaagtgaccagatcacattttaaagttctgattttttacattatccagtctgagtttaatttggggtaatttgattagaagacctgtagttctaatgagaaatagtcaggcttggagagcaaagggtaatttaattctctagtttattaattgtagtgatgaatagtaaaggcttttgaccatgcttcatgacaactcctttttcatagctttttctcctgctctggatttcttttgcagtcccaaaagctgacctgcaagaagaggacgcagaaatagaagtagacgaagtcttttggaatacaaggattgtaccgattttgcgtgaattagaaaagggtaaaacacaaacaaacaaacaaaaaaccgtttttgttttttttttaaaaaatacctgtagttatttatgtgttccccattgccctgatatttttagtaagttttcactatcatttctgtgaacatgttcaaaaacaaatgaagtcatctatttatttaccctgtgtgtgttaaatattacatgcacacataatttttagtaagattatgctttaaatgcaccaagagagccaatttctaaaacttccctttgtaatataaattaattagcatttcctctgtccaaggaaatgctggtttaacctctctcaggtggctcttcatactcaagaaagtaaaagattaaaacagatttcaggcttggaagctgagtctcataaactggcgtccttgacaggtgtgcccgtggtttccttggtccaactggtatctgtcctactctcttgaagggagcacatccgtcaggaatgccacccacagcatgggaaatggcctgggatgtgtcccacccttgcgctctgaactgccccagaagtgaaggcccaccatcgatgggtccctgcaagggtagggaaagcgtgtcatgggatggccctccactttctccctctttgcagctagctcctcaaggattctctttctgaagttaaccaggctcctctggagcagtggtcatagccctagggagagcccagggcctggcacacagtgcacagtaagcctttgctaggagttgttgatgagcaaaccagcttggtagccacaggaagatgctctaagagaagcagggtaaatgaaccctccccagcaaccaaacagagatgtgctgcaaaagacctgattactgaaaggttcaaatgacctcacccctcctctgctccccattggtgcttggctgtgttcatggttaatgtgggagccctggacggggttctggtcccggtgctgctactcgccaagcgtatggccatgaggagtcacctagactctgtgtgcaatagtgttctcacctgccagatgaggtggagattaggttatctccaaaggcttctgcagcccaaagtcctaaggatatgaatgtgatgactttttcccctctagagttactatgttcaccctcatcttagcgtgccacgttagctttgggccctttatttcaggagatatgtgcaaacactagtgagaagaacaatgagtctggataagggttacacaagaaaatatattgcacaacattgaatggggacactgagtcagtattgtgaaggcctttcttgtaggaagccttcctacaggaaagaaggaatttttttttttttttttttttttttttttttttttttgagacagtcgctctgtcactcaggctggagtgcagtggcgcaatctcggctcactgcaacctctgcctcccaggttcaagctattctcctgcctcagcctcttgagtagctgggactataggcacccgccaccatgcctggctaatttttttgtatttttagtagagacaggggtttcaccatattggccaggctggtctcaaactcctgaccttatgatccacctgccttggcctcccaaagtgctgggattacaggcatgagccaccgcacctggcctaatttttttttttcttttgagacagagtcttgctctgttgcccaggctggagtgcagtggcacgatctcagctcactgcaacctccatctcctgggttcaagcaattcttgtgcctctgcttcctcagtggctgggatgacaggtgcgcaccaccacaccctgctaattttttgtattttttgtagagatgggattttgctatgttggccaggctggtctcaaacttgtggcctcaagtgatccacctgcctcggccttccaaagttttgggattacaggtgtgagccactgagccggctggcatgtatttcttagaaacaaaaacattctcttatatatctggaaattaccatacaatactataaaaatcttactcaaattttgccaatttgtcccaataatttcctttgtagaaaaaataaaagcctggatcacaagttctcatcatttgtcacgtctctttcgtgatcttgatgtatttgaggaatattttacagactgtcccgcaaattgggtttgtctgatgttttcccgtgatgagctccaggttagcatcttgggcaggcagagcacatgagtgctgctgtgtccctctcagcacctcctgccaggagtacacgatgctgatgcattctgttgctggtcgtgtcccacagctgtacccactgtcaggtttttattctttcctttgtaatgaatacatatcttggggatagaagttactctgagattatgttactctctgttacaatcaaacttttacccactagatttagccccttgcaaatcttgatagtttgtagattcaagttgtcttttgaagctatagagcatttataacaaactatttggtataaaggattgatttgatcaatagtttaaaatttgacccttgagcctttctttctaacccctttttaaagctaaaaacaagtattcttgagtagaacctaccaggctgaagagtttgtggaaggaagtcttagaaaatactttgaggaccacccactgccaatgagtggcccagagcctggacttagggtttgtaaagaaactgccagtcacagaagaataaaacaacaaaacacaagtgtttcatacaataggagttcaggtttttccctttatttaaagttaggctaagtcatttcccatcaattcattcatttaagtgcataaccaaaagacattgaaggttacttagctattgaggtttaaaattttttcttagatgttattgttgaaaagagctaaaaatggcctgagtcacttccttctgcaggcacacacttcctctatgtgggcttctaagagcacattatggtatttatttaagattggtttcctacttttaaatttcatgaaggaatctatcagagataatattatttgacagaatacattagattattttatttcccctcatgttccatttttttgtgctatttttcttctttgtatgacaattagtgtggctgccacttccaaaaattacattcccaggactttgggaggctgaggcaagcagatcacttgagattaggagtttgagaccagcctgggcaaaatggcaaaaccccatctctaccaaaaataaaaaaattagccaggtgtggtgacaagcgtctggagtcctagctactcaggaggctgaggcaggaggattgcttgagcctgagaggtggaggttgcagtgagccaagaatgtaccactacactccggtctgggtgacagagtgagactccatctcaaaaaaatataggtattactttcctcacaaacataattataagatgaaaggttcaagatctccctgtttcctaactaaaatactctcctttttttaaatttattttttattttattttattttggaagtaggatcttgctatattgcccaggctggccttgatcctggcatcaagcaaccctcccacctcggcctcccaaagtgctggatttacaaaaatatttttattctcctgttttttaataaccacctccagataatggtggattttgtgacatttcaggcttttgttctattagaaccctcttttcttaggtaatgagcattgttctcataggaaaatactgatcattgtttttgtcaacagatatattagaaaatgaatatgtgtgaagttatgctatatacagtattctatacaatattctcactgtaccatgtgctattgatagaaagaaatgtaagactggctcacttagtatgacatctatttgagggcactggtcatataacacaacacacacatacgtacatgaaaaataagtaacctaaggtaatgtttgttgaatgtggaatagtgcatcttttctgaagcagctacaacataaacagagcctcgaaggaccaaaaacagtaggaatgagggttatggagaacattttaggccagtagagctatgcaaaaaagagttgaaggtcaagatgcaagtggcatgcatctgtgagactgagcagatcacgggctgaggtggagggcatctggagtaaaggaggccaactgaagcaggtagcagtcccattcttcaatacctctttgaaagactgtgtattctagataagctaatgactgataagcaataagtcaacatggtaggagatggatcaaagggatgaaaaaaatcaggtagatggaagtgataagataagaaaaaaatagaggtcaggaatttgaagatatccaaggaaataattatggggtttttacttacactgtctgtgtttgacacacttggaaacttaaccttaattagtaagtgttgctttactctctttgctctgacagaagaaaacattgaaacggtttgtgctgcttgcacacaacttcatcatgctttagaggaaggaaacatgcttggaaataaatttaagggaagaagtattctcctgaagaccctgtgtaaactagttgatgttggttcagactcgctcagccttaaacttgcaaaaataattctagcagtaagtttttctttcctctggtctagtagactatatcacataaaagctttgtttaatgctttatttttaaatattacaaagaatattagaaatgcagtgtatttgtttagaatcttggaaaaaaattaaggtaataaactgacatctcagaatttgactaggaaatattatctaaggaactaaggctgagtacatagaaaatgttaaaagaaactcaacgtttttggactgcaactaagttaaaaaaaaaaaaaagaagaagaagaaggaaggaaggaaaggcaagaaagaaaaagaaataaccgtaggcaaatacattcaaaatggttgctcaaataacttgactggagatcagtagcagatggtgcaggcagtggtttctcttggatgcttgattctgtcatatgatttaataaataactaagtaatttaggccacagtcataataaatcaggtgctttaggaaccagtgtgaaaccgaaatacagctgcgtgtggtcacaggaaggtacctcagtggtcatagaaggctttcacaaggtgtgagaagaaaaggccagacaccaaaaaaaaagtctgtagaaactctgtctcaaacaaaatgatatcactgtttgaggggagcactttgttgtcacagccataaacagttggaaccaaaagataagccacaattattatagaatgttctaagagagccgctaaaacaaatgaatgaagctttgttttcttggtttcatacaagtacaagctttgtgctaacaccccataatttacagaatttaaaatcttacagtacacagtgaaggtaagtgttggcgtacttactgttagttaataagaatgccaccttttcttattctgataatgaagtctttcataaagcagaattttctgagcatatatctatgtaatatcagggggaggctacattcttattcagctctcaaactattaactctctttttaaaaattgtgatatgtggtcaagaaagcaatacttctttgaaatagtgatatcactccagggctctggcggtgcagcagctgcccaaagattgcctttgctattttaatctgaatcctagacattttgttccataccaagccaaagaaagagagaaagagtgaggaaaaaaaaaaaaagaaagaaagagcaagaaggaaaggaaggaggaaggaaggaacatgaattattttaatgctttgcagagtaaatattatttcggttattaatggtgtcattcaaattaattatatatatgacacaaatttaactattttagggcaaaaggctaagtgatctgccaggcagtgaacatgttttgaactaaacatatgattagataaagccctcttggtgacattgacggccttgctgaatcaggagcaagatgctaggctaaactccagagtgcagagctgggtaggtttgccttctgactagctacagaaccagcagttcagaagggaccttcaaatccatcaaggccaacttcccatctactgcctggatctcctgtaacattccagacaagatcttgtttagcttaggccttggtgatgcggttctatgtaaaatgttaaaagactacatcataagaactgttgaagaagaaaaaatcagcaaaaactaaagctatatgggactaagaagttttttacaacttctctctgcctgtttattggcaaatactggcaaatgaaagttttccagacagtcatcttaattttaatctttgtgtcagaaactcttacaaaataatatacaaaaatatataagcttaaatgttactatattaagattttttaaaggagtacaaacaaatatatacagtatgaatgtgactatatttaggagggaaaaaatctagcgccctatgtacagggtaaaaaaagaaaagaaataccaattaccaactgtgatgctatatagtggtactagtatgagtgattttaaacttttcttacttttctttaatttgccaaatttactttaaatagaataaactactgtttttaacataagaagaaaactaccctaccacaagaacctactttgtgccaacattttttttttttctttttcttaaagacaagatctcgctcttgtcacccagggctggagtacagtggcgagatcacagctcactgcagtatcaaattctgggctcaagtgatccttctgcctcagcctcccgaggagcttaggaccacaggcatgcaccaccacacctggctaatttttaaaaaatgttttatagaattggggtctcgctatgatgcccaggctggtctcagactcctagccttgagcagttctcccactttggcctcccaaagtgctgggattacaggtgtgagccactgcacctggccagagactcctcttgacactgggaatacaagtgaataaactagctccttcctctggggttgccacagtagcagggcagacagacagcaaacacagcaggtaccaaaggagataatgagaactaagggagaaaaataaagcagagcaaaggaaagggagagtaacagggaatttttaaaataagatcgtctacatcccttgcataaatgtaagattttattatctttttatgtcttaaagtcataattttacggttaacaatggagaagcggtacaaatttgcactgactgtaaattgacattatagcaggcctggaaattgtagttgtcttttttcttttctttgttttcatttttgttttttcttcttattgttttaatgaaaactctgatacaaggttttgttttgttttgttttcctttgccactttttactaaaaatgtaagatttgttggggaaaaggaaagtgagttgtattcatttttttcatgaagttttattaagtatggaacacatcctacatactacatatagaaagagtaataaattgtggttttgacctcaaggactcacaatctagtagaaggtagtcaaccaattcaaatatatttccagatattaggaataatatatatttccatcaatatagaaatgttcttctgttttctttctttctttttttttttttttttttaccagtcatcttttatttggaggttaattgccattaggatatgaaagaattcagcaacgatcgagattgtgttcctcacagaggggctcgggccaaggtcgtggggtgggggggtgcagagcgtgtcctcttcagtggtatttgcggagccactcgtgcttgagatgcttgtaggaaaaggagtagctgaagagcacgtagcatgccagcaccatggtaacccccgagatgctccccttcttcacattgatgtacttgtagtaccagtagtaacctctttgaaacgctccgaaaatgccactagggctgaagtcccccatcaagatccagcttggcagctcccccagtttgacctccagaagtttcttgtccttcactggtacaactgacgctatcttagagtcctggtgtccgctgtgttcttctgttttcttaagcccgcttattttctgggggttttaaacaatattattttaaatacctaatcattaaacatttattaaggttcccatttcctattttcctcctgggaacagaaggaatctccattctgccatgtgttacagtttctgaagcttccacaacagtgtttcccagacttcactgtgcacatgcatcccctggggatcttgtaaaatgcagattctgagtcggtagtgctggggggggcctgagattctgcattcctaatacatgcccaggtgatgctgagatggttctgtgacctatctgaggcacgcactcctcaagtgcaaagtgtgaacgacaacaccaaatttccagaataacttttgtaagtggcctagtgcaggagggtatgcagaagctgccccacaggcagtgctcccctccccaggcccctccagctgggggctgaccatggccgttttggtgtcttctgcagtgagcagcatagcgcctggtacacatcaggtgcccagtaaatacttgtggatcaagcacagaacaaatacttaacaaatatgcctgacagattctattatttttttaaagtaactgaaaactcattaataaaatgtgggaggctgaggtgggaggattgtttgagcctgctagttcaagaccagcctgggcaacatctctacaaaatgttgaaaaaattagccaggcatggtggcacatgcctatagtcccagctgctctggcggctgaggcaagagagttgattgagcccacgaggtcaaggctgcagtgagctgtaatggcggcatcactgcactccagcctgggtgaaagagcaagaccctgtctctgaaaaaaaagaaaagagagagagagagaaatgtcgtagccgggcatggtggctcacacctgtagtcctagcactttgggaggccaaggtgggtggatcacttgaggtcaggagttcgagaccagcctggccaacatggtgaaaccctgtctctactaaaaatgcaaaaattagccagtcatggtggcatgtgcctgtaatcccagctacttgggagtctggggcaggagaatcacttgagcccaggaagcagagattgcaatgagcctagatcatgcccttgcactctaagctggggaagaagagtgaaactccatctcaaaaaataaattaattaaataactttaaagatagtttttaataataaactaatcacctatatgccatccttttcaaacagaaataattttttgttcagatgaccttattcctacaaatacatttttacacctttgtaatgagggcacatattatttccatctaacagtaggttacaaatgtttccctttttagacataatgttcacagttatgcttttttgtgactgcttaatatgatagtattgatgtcccacaatttaataaactattccctaatattagatacttaggatgttttttatttttcttttttactactttagataaatacacagctaacttagaccatttgattccgtcagtaatcctatactttgctttttaaaaaaaaaaacactatatttccttatcaccccatgtttaatttacttagatatttttgtatgatttagaagagaattttcttttctttttttattttttgacacggggtctcactctgtcacccaagctggagtgcagtggcgcgatctcggctcactgcaacctccgcctcccgggttcaagtgattctcctacctcagcctcctgagtagctgggattacaggcgcgtgccaccacacccagctaatttttgtatttttagtagagatggggtttcaccacgttggtcaggctggtctcgaactcctgacctcatgatccaccagcctcagcctcccaaagtgctgggattatagacgtgggctactgcgcccagcctagaaggtaattttcaactttagatgttacttgtgattatctcaaagcattccagaaatagaccttaaaaagaaatatatgtatattatcaaattaagcagtattacttttaaattttcttttatacaaatgataaaaaagaccaaaactttccccctttcttttctttccttcatctctactatgtgttcttttctaaattaatgtgaaattttggtattcatcttcctctacttttgtgttttaatgcaattactctaatcaaatttattaacagtgtactgcacccctttcttcctcatatactcctttaaaagtaactaataatcgcatatataaatatgagacttggctgggcgtggtggctcacacttgtaatctcaacactgggaggctgaggtgggaggattgtttgagcctgctagttcgagaccagcctgggcaacatctctacaaaaaaaatgttgaaaaaattagccaggcacagtggcacaagcctatagtcccagctgctctggcggctgaggcaagagagttgattgagcgcacgtggtcaaggctgcagtgagctgtgatggcagcatcactgcactccagcctgggcgaaagagcaagaccctgtctctgtaaaaaagaaaagagagagagagactttatgaagtaagaaatatggagaacagattggaggttcctcaaaaaactaaaaagagagctaccatatgatctggcaaccccactgccaggtatatactcagaagaaaggaaatcagtgtatcgaagatatatctgcactcctatgtttattccacagtattcacaatcgctaagatctgtcattaaaatgtttattctaaagataatttatattgtgtttactctaattgagttaattagataccacaattggcaaatatgtggtctaaatttttcaaagttgatttctttagaactttttcatgtttaaaaatactgttgctgtactttaaaaatagatgtggtttattttttttaatacagcatgtctttatttccttctgcaatagagatgtgtttctttctctgcagcttaaagtgagtagaaagaatcttcttaatgtctgcaaacttatatttaaaattagcaggaatgagaagaatgattctttgattcaaaatgacagcattctgggtgagtgtcattcagtgctactattgagcaaatgctgtacttgagtaaaaattagaagtctggagagaaaatatataatcaatgatagcaagaatattttgttttctagaaacatgcagaagttatgtgatgctcatttttacttcatccttctctgttttccacattcagttgaatgcatcctgtggtagtttgctcttttccttcaacacctgtagtaacattatgtgactttacaaagtgttccccatttaagaattcatttcctggacttggatttaatatatagaaaaatgcatttaatagtatttgacatagttgaaaattttagtcttttaatatactagggatgactaaaagttgaaagacatctataactgttatagaaacctgacatcaacatgtttcaaatttgtaggtaaggaagttttattataccttatctagctaatgcctaatttttgttgtacttctaagtaattaagatatctagttacctaaatggaaatctttttattaattaatattgctgatacaagaaaagaaaatacaaagtattttccatgcagcaacatggaaaatacattgagttctctttttgcaacataggataaattatcttttcatctttctttgcccctggcagatagggacaaaaccagtactgaaagaaatgtctaatgttgaatcaactaattaagaattgtcgactgaaaacaaattatgtcaaattattacattgactttaatataattaaatgtgagatatgcattattaacgttattggatttgcctggattactcgtaaaaccaagtagtggtatgttatttgaataaatgttcttaagttgtcttgggaaaaggataggcgttatattcaagttatctttctagggtgattgagatttttttttaagccccttcatggatttcccactaagaatacagttacaaatatattcttaaaggcttgttgaagtttaactcttagatgtgttaaattattagtattctatgactcaaaatttttgtaacaaaaaataaaggtcaataaataattagtaagaggcaaggaatgacattaattaaaagaatactttctcatttatttattaacaatcccatccttctgctgaaattactattacagagacttatcttagctaaaagtaagcttttctcttatactatataactcttaacaagcacttgaatgtagattttgataaatatattttacgaagtgtattttatgttcacacacaagtgctttaatatatttctctccagctgttatactcagacatttataataattaatctttttgacagaatcattattggaggtactaagaagtgaagacctgcaaactaacatggaagcttttttatactgtatggggtctataaagttcatttctggaaatctgggatttcttaatgaaatgatcagcaaaggtgctgtggaaatactgataaatttgataaaacaaataaatgagaacatcaagaaatgtggtacatttttgcctaattcgggccacttgctagtccaggtaagtattttacttgaaaacgttagatgtgtaaaattagttttcacattgcctaatgccagttttaaaagaatggcatgcaagaggcccctacagccaggtgtgggtgcctggcctccaagggcagcagccatagcccacctccaccccatgagggcctggtgcctgttgtcctggacaggctattccatggctattacaagagcagctctccacacagcatgcgctttcactgccctgcagagaaagcaggcctggaagaaggaaaaagttgtacctctctgcaaaacaattgcatgttagagtcaaaattttaacaagctgcttagagtgttgaagatgggcctggcctggagatgatttatgatgattggtagctaatgtcattactcttgtaagaaacagaaggtaacgggattgagtggacagtcactgaggtgggtatgtagatatcaggcagccccgagactgtaggaatgcagggaacaaaactggacgcatggaatataaacagagcaggtagaccaattttgttatatgttagggttttattacttctgttgtagcagattaaatttcatagttaaattattttcactggagctgctctggcttggatactcttttagatgagattttactttttaatagcattcatatatcaaataatagcatctttgatgtaataattcataggattcgaaatgtgtttgtcaattaatgaggattgattgagcactcagagcacactaagccattgggaaactgtgttaaaaattagatttaggccctgccttcaagatgcttaaaatatttaggatgattattaattttggactttgtggtctgtctccattttgaagaagattgtgaaaacctcttttagtcatcaatgatgcacagtttttctgtatgccctgttttggctaggaagacttcagaaacattttccatgctcccagtgttatcgaatcatttaattttttccctcaatgaaaatagtaatttctaattatagaataattatatttcctgttaaaatgctgaaaagtataaggaagaatataaaaatcacctgcaattttttcaccctgagataacacctccagcattttggtggtcatttatatacatatacataatttaatagaattctcactttttaaataacccgttacttttaatagtcacttttgtttgtttgctatcattctcttccctccctgtttctccttctggtttatccatttagctaacattgttcacactgatgtgttcagcaccttttagtacacacacaggattcaacaaatggaatattctatgcccttctctctcctcatttaacaatatgtagtaaaaatcccttgagttaaccctaaagacttatttaattcttcttaatgactgcataatattctgtgattaggatatatctcaaattctcagccattcccatattgagatattcactctgttttaaatttttatgtaacagcttatgggattcttgtctagttaatctctttccaaccccatcttatacatatataaatgtggtttgctgtttgcatcaactatatcactgtgtgtgtatgtctgtgtgtgtgtatgtgtgtgtatgtgtgtgcacccacacacatatgatcagtgggtatgaagggaagttgagtgttactgtgaccaaaaatatatcaaatcaagaaaggggacctctggtgtgcacatatagtatattactccctgtgttactcttttatgtccctttcccctggattcagcatccttaggtgcaaactgattcaccaggtcggatcccccctcctttcctgacatttgtgtccccccacctctagggggcgctgtagaagttcctcctcactgcccaccaccacctgccaccacctgatggcagtgggctctgtcattgtctccaaagcctttcttggaaccagcctaaggcctggcatgggtgacccacacccctgtctagcaggagaaaatggagcccatgatggcatccacccgaacttactccagctgtggtcaccaaatgccatttgtatcaactgtatcactgtttgtgtgtttacagatttgggaaggaaggagacattgttttagtctttgtcatttgcagaatcccctgaatgggacatttcctcatatttaatgaaaacaaaagctgttttgtatcatacaaatgataaaatgtaagcaacaagacttcactccaagagcagatgaaagcctctgcttttgtgaatgtgtaacactgactgacttttcaccagccggttcatgtgcaaattcagccagacagatctggccacaagcagaagtgtctgtttacaccagctttgagaacctggtaactccagctcagcaggcatttttttttttttctttttgagacagagttttgcttttgtcacccaggttggagtgcaatggtgtgaccttggctcactgcaacctccacctcccaggttcaagcgattctcctgcctcagcctcctgagtagctgggattacaggcacccgccaccacgcctggctaattttttttgtatttttagtagagacagggtttcaccatgttggccatgctagtctcaaactcatgacctcaggtgatctgcccacctcggcctcccaaagtgctgggattataggtgtgagttactgtgcctggccaggaggcatttttaaaagcagcttttttcaattgaaaaaataaataaattacttgtggctgtagtaagaataaaataatgtctgccagccagagagaacatgacgagggccaaaaagatacaagcaggcaacatctagtggcgtgactgcttttcttctatgactttcaaccccaagaacctcaggagctttggcccactttctggggacctcatattacagaacttcgcttgctttaacatctggcacagcgttagagtcatcttgttttccaaaagcagctccgttgggctcattgaaagagtggaaaacatcttccaaagctggaccctgaagattgtgcaggatttgggaaactagaacaaagggaaaaggatgttgaacactcaagtgggaaataaataaggtgtgtttgggaggtgctgaagaggtagggctgtctagagtagagattctgtgtgggaatcttggaaggtgagattcacaaggtacagccacgagtcttgaataccagctgccaagagtggacttggggcaacaaggagcagttggaggtgagtgcatggggggacgagatgagatcagagcggcagaaagatgaatgtgcacaaaatgttaaactgataaagaccaaatagctgaaaagtgatgggaggagaacgtatccgtgatacatgacagattggagggctaagatctcaaacacagcagccccagttaagaggcattgctgcagttagattttagactgattagaatggagacaaaggaatgggtatgaaggaaaagctccttcaaagcagacggactaatgttgcttagaggaaaaaaaaacacagtgttgaactttggaaggtcttctttgtgttgtttcttacatatatgtatacgtatggctgtatgtattgatatatgtttatcacctggtggctgaaatcaagagacactcatttcacaagttttgtggcgtggctgctctgtgtcaaacatgttctgggtgatgagtaagacaggagagctgtcagtaggcacctactttttggtgatccctgtatccagataatagtattccaatgcttattcttctgcaaaattatggtacttccacatggccaacattgcattcagttctgcatgtcagaaatgtaatagcattttgagaaggacaagatgctcagagaaactgggtgctgccacctgtgcatcaagtcaaagcgtgaatagccccaggctggcaaaactggagatgcgagtttgtctgtaaagtcgtaagagtaaagcaggttaaactgtgcatgttcactgaactccagaacactagaatttagggtgagctccctggaacttggaaaaacagaaatataggccaactaacaggcaaggcccctaaatgccagtagtaaattgcaccaccaaggaggtggcacagatggaaagagggacttgtcagtgttgctctagaatggattatcatgaggtgttagggttcgtctgtgacctttaaagagctacagtcgggcaggcatgacacaggagctgaaggaaactcctggggtcacctccatctgaaagtctgttttggtctctgttgtgccctttcctggagaacagaagagtcttctgtctatgtcacaatcacaactaagcccaaattctcccggtgtctcctttgtcctctgtgtcttgagaacatcatgtacaaagctgctttgctgtgattgaaggaaatctcaatgtacttacattaacagctaggtaatttataggtgtacaatgtaactattaaagctcagattgacttgaacttgcatgcctattttttggattcacttgtacttccaatctgttttttctttacagcctgacccagttgattttgaattcaatccttagagaaatgtattatttgccttctttagatatactgtttttgaagttagaactgttctgcagcaccccaggtaacatggttttcttttcctctccacagccccctacccccgcttctctggcccctaagcctgcagacacctccctagcagctcccgcaaatccagatcctctcccccttgctcagtaccataccactgtcatgttcttcctttttctaaatggaagtctctcgggaaggtcggtcctcccacctcatcagtcctttccttccttcactcggttccttccttttgtttttagggtttagggaataggaaagtgtatggaacaaagagagctgactcagacaatttgagcctggatagttcagaaaataataaatgatggtatcatgaatagaaattagagagttacagaaaggaactggatttggtgagaggaggaaagaaaattgtgggaagaaaattatgttaattagctttatttttattttttaaattttaatatatatttttttgagatagagtctcactctgtcgcccaggctggaatgcagtggcgcaatctcggcccactgcaacctctgcctcctgggttcaagtgattctcctgtctctgcctccagagtagctgggattacaggtgtgtgccaccatacccagctacattttgtatttttagtacaaaactaaaattgttttagtaggtctctagtagagatgggttttcaccatgttggccaggctggtctcgaactcctgacctcaagtgatccacccacctcagcctcccaaagtgctgggtttacaggcatgagctactgctcccggccgaaattagcttgaatataaaactttcagatgccagcaggcctctcaagtaggaagtaggagatatgagctgaggcttggaagagcaggtaagatcaaaaatacagatttagggtcatctacatggatttgatggttgaaggcagaaagacaatgaaattacccaaggagagagtagagaaagagcagagggactgatgacagattctgtgaaaatggcctcatttgtggaatgggaagagaaaaggaagtgactaggaaatgaagggcaatgtacaagagtgagattttctcagcaaggatgggtcagctttggcaaatgctacagagagcgtgtaggagaagagggatcccaccactttgtttggagccgtgcgaataggcgagcgaggggtgtgagggggccatctcctagggcaacagtgtgctctcttgctctctttcaatcttacatagttctttagctctgtatttttaaattaaaagatgttttgatatacttgattttttttttttttaaatttctgagccctagagtgagctccccactttggcagagctgggctcaatcctgtattcattgtttgccgttgggaaccctgatggttcattcaaccctggacaatgctggggcaggcccagtgccgccaccctgcatggtccagtgaggatagcaccgcactggagcccccagcataagctggcctctcagctgggacactgagcccactttaccctctgagcctcagtttcctgtctctaaagtgctgactatgcctgccttaaagggcagctaggaaatgaaatgagatcgtctagtaaagcgcccataacagggcaaggcacatagtaggcactcaccagaaagccattcaataaaataagatcagaattacccaaacctgaagcttcaaagagcaattatttctgatgggataaaaatgtaatcacaagaaattaagaagacagagtccaagatgactttcaaatatttaatctttttgttcgggctttgataagcaatgtagagaagagcaccaaagagaaactaaaattggaggagggtgttagggtaatgtatgggattctgggtacatgatggaccccaattctcagagccagctattctttgcttcaagatttggggaatttaagagaggccttcaactgaagtctggggatttgatcaagcagtgacttaagttattattagtaatgaaggttgtaccaggctggccggggtcttttaactcttgctttagttatgtttcatagtttttaaatgtagagattaatgcatttgtatttaggtgtttagataattataagtatgtgtacttatgctggaaattatgttaattctttatcttgcgcgaccccacctattggaagcctaactcttcagactgtgcaatcagaaccaaggtagcagtgtctaccagtagaactttgctctgattattggaggaagtaaactgcatacctataaaatgggagcaaatagccccatgattgtatttcctaagttcttacagataatttttttttggagatttgataatttaaaccaaatttaaagcatttattttgaaggttttgcttgaatagcaagcagtagatgaggtttttaattttctttttgttttaattaaggtataatctacatccaataaaatgcttagatcttatacgtttgatgagtttgacaaaagtagaaagccacgtagcccctacccttatcaagatacagaaggtttctgtcacctcagaaatttcctcccacctcttctcattaatcctcattcttctaccctcctcccagagggaaccatttttctgatctctttcaccatagataagctctgcctgttctaaaactttatataaacggaatatacagcatgtacccttttgtgtctggcacctttttaaacttttattctgaactaagtataaattcacaagatgttgcaaaaatagtaccgagatgtcctgtgtacccatcatccagctcctcccagtggtgatatcttacataactattgtacattatcaataggaattgatatggatatgccatagttacctagagtactatatctggtttattttgcttagcatattgtttttgagattagatgaagctattttaggggttagtctttggtattgatcactacactggctaattttttattttgttttgttttgtttttgtttttgtttttagagatggagtcttgctctgtcgcccaggccagagtgcagtggcatgatctcagctcactgcaacctccacctcccgggttcaagcagttctcctgcctcagcctcccaagtagatgggattacaggcacgtgccgccacttttttaatgatgtatttgttaatgggaaggagacagctattttctacttatggggcttccttcctataaaagaattgccagcagcataactaaccactcacgtgcccagttgccacgagagagtaggcatttggggcccaggttcttcctcttcccttctcttccctttcctaggaaggagctgtctataggcaactcatgttctcctccaattttccagggacagcagatctgaagatctgagaagactcagaaacctaaatatgtaatgccttgggttttttacttggaaataagaggctaaggaggctggggatggggataaagttatcaccgtggttggaggatgtggctgatagctgaggcaggcatgctttctaatcctgagtcctagaattagatttacccacccagtcacagaccatgtctgtccctggaggagcagaacacctttgttctgatggcagctcacttctaaaagaggaagggaagagagggaccaggtaggggctggactgggagggtctgattcctgtcccaagctcaccaatcaggaagtgagggcggtggatggccaggagtgttatgctaaaagacagatcaagggtggaaatgaggctcctactgtgtctgaggagagccatttgctctcaattagtgctctgtctgctcagcctcctctcttcactgtagatctattagttgtggcagtaaggaaatgtcactagctttagcatataattgtgaatagtggtttcattgcttggtagttcttaatgcactatctttttcagactcctttttcttgttttgctgcattgccattctagattgtttgtatgatattcaaaatttctcctgtattgaatacatacatagccacaactagaagaatcagctacctactcattttagtgaagtaactggcatagaggcagtaaatggagaaacaacaataaacagagccaaatgttaaatagagtctcaaagtaggacattggaggtttaaggaggacagaagcatttcctgctaagtcggacacccatggtagggatgtgccaagtaggcctgtgtagccaggcaccgagtgttatcaaggattattaattaatattaccttcatatgcatatatcttaataaattccaagaaaagcttagacatgcatgttaccagtgatttcacatgtctagcagcatcttgtcattggtttcttttgtctcagccagaactgtacaaatcatatatgagacaatatgaaacttcttgggttaccacacaggctctggttttggcatatatgtggcctcaattgggcacaagttcaaagaaatgaatctgcctttattaatagagggagatggcttagctgaggttggaaaatagtggctttagtcataaatcatttcacactgtttgtggtctctggcggctgcgtttattcttttacatcatcagtgggaagtcaacaattttgcagttggcagttaagttgagacaaagctcgagggatttcagttgtggatattccagatgattgcaaaatgcttttagagaccagtgccaaatagagtagggaggcaatagaccaagaaactgaggccagggcactagcctacctgggagctgatagacttctgagcttcaatgagtcacaagctcctctgatctggggcagctctgatggcaggttgccttctagagcagaatctggtgagttccttgaggacagagtactctgatggaggaagggcacagagggaaaagagagggccgtccactctggacatgatcagtgtgtgtggaggttgccccacctcgcacccacccactgcagtagagaacgcaggaatgagaccacagctgctgggcctgtgttgtgtcctcaagtccagtgatccaagtccggagggcccccccacccttttttttttcttgagacagagtctcactgtgtcactcaggttggagtgcggtggtgcgatcaaaggcatggctcactgcagcctcagcctctggggttcaggcgattctcctgcctcagccatgagagtcgctgggattacagacctgagccactgggcccagccccatattttaagacaaatatttcctgtgtttgctaaggtttctcaattaattaatagttgaaaacacaatttgaaattgataattaagtacctatagtcaacttgaaaaaaacagaagctaaagcttttgagttctcattttactgtattaaaatgtagttgtgcatttataaatgatctaatttcttcttagtacattttttccctttaaaatgggtctcccaatactgactacacaatgaaaactttgaggcttacataattcaatgtgagctgggtagctttgccaagtctccaggtgttttccctgactgagggtggtacctgttatgatcaaataatttggggaacatggaaagaagctttctcagaaaagtgagcaccagaaagttgtcaagtgtagctcagtcatttttcagtagtagattggtaaccagaagcaaaatggaatgtttcttcctgggtatttaccaaaaccttaggtccccttttgtcctaaacatcacctaacaattgctaataagcaaggaaacttacatttgtattagtcctctttgtggattatcagtgtcattttcttctcttttttcttcttcctatgggctgccttcaggattgcaagtcccacaggattgcaagttaagagatgggggaaaagataggaattaaaacttgtgtttttcagtgtgctatttcttggtgaaatgctacttaagaggttgagaatttctctactaagtcctttagagactaaacaagactttttttaagtaagggatttgaggtggtttgaaagattatatacaataaaaaagaaaaatgtgtgtttaagtttgtgcatttatagataatataaattagaatagaaagttaagaaagaaatggatgcacacctccaagcatgaagcttgggctttggttaactcctgctttgggggagggcccagtgggtgggcttttcttgagggtgggaaataaagaccctgctgtagagcacagaactcattgataattttcacagatttatctctgttcaactgagagttcttgttttcttttttttaattttcacttgtatataatgaattcaaaagtaggagcaaaattcagttaaatgggttgacttggaacttgcctttactgtgaccacatgatttagctagactctcctccccacacccttttttttttttttttcctgcattttttccagaaaaggccactggtctgagcattcagggccccaccatcatcccacagtgagattggtggctctcagaggttggtgacaagtctctcaagatacagggccttcagagctgcatctgcgtggtggccttttcctgatccttctccctcagggttttaggccctggttcacccaggcctctgctaagctcccgcactttcttgccagaggtgtcttaaagggaaaaacctctcttttgtcgctcctgtcccttctttctttcttccccctcctcattcccctcctccttccccttctcattcactcttccagccctccagtagctgaacatttaagagctttttatgagcacatttgttgtcctctgaatagaaagaggaataagaagtggtttgtaccctagaggagctcaccatgggagagaagatgcctgaagacaagtgacaatgcttctgtgatgggggttgtagaggcaggaacaggatgctttggtaacacggaagaggaaggagaggaagtgactgatcagcctcggaaaggacttcacagagaagttatcttgagctgggttttgaaaaatgagcaggaggccgggcgcggtggatcatgtctgtgatcccagcactttgggaggccgaggcgggcggatcacttgaggtcaggagttcaagaccagcctggccaacatggcaaaaccctgtctctactaaaaatacaaaaattagcagggtgtggtggtgcttgcctgtaatcccagctactcgggaggctgaggcaggagaatcgcttgaacccaggaggcggaggttgcagtgagccgagatcgagactctgtctcgaaaaagaaaaaagaaaaaaatgagcaggagatggcccgggggagaaggggtggcaaagtgtaatcgagggcactctgggcggaggaagccgcctattcaaaggcatggcgtcatgaagggttgaggacctcatgtggtgcagagtctgaaagatggccagggtggtgccgaggcaaaggagatgagtttggagggataaaccacacttcagagactgaggaacctttaggctatgggtgctactggctgggccggaagtcgcaggaggcctttgagcagggaaggcggagctttgagatgccccctctggcagcagtgagcagctatgggggcaaactgtggaaggagcccatccagggggctgtagagtttgggtaagagatgaagtgagcttaaactgaaccagtgacgctggtgatggagagaaggggtgaacgtgtgaccagtcaggtggggaaaggggtggggcccgggagtttaggagcttgggaaggagctgctgtcagaaatgagataggctagagaacaaatacacagaggctggtccccttccagagagttcatttttctttcatccgttattttttattctgtgatggatgggggttatagaggcaggaacaggatgctttgttaacacggaagaggaagcgactgatcggcctctgaaaggtcttaaacatagacaagttagcctgagctgggtaactacagagtccatttttctttcatccattattttttactcctctgctttcaaaaaaaatcttaaaatctgtctacctcagagatattgtctgcttagcccatggtgttctgatatcccagtctttcctttgtagatgtccaccccttcattcattccattaataaatgcctattgagcgcccaccatgtaccaggcactggacttggagctggatgtacaatggtgaaaaggatgaacaaggtttatgccttcactgaagcgtctagtctggaggagtagacagatagtaaaccataatattaaataacctagcattaagtagagtttatgggggcatatatggtatgagatgaagcttgacgggttgagaaggaacagatctgttgagccttgtagaccatggtcagggaactgaatattatcctgggagctatggacaaaaagccaatatggcttggagtaacagaaagcagaaaggcaggattctgggatatctctgcttgagcaactaggttgatggtgtcatctattgagctattgctgtgtatttttcaaatgtatggtatatgtttcatgcatgttatttctaccagcaccacaaatgacaaatttggaaatacgtgaggtattgtatattactcaactgtgtgtatcacgtgcagtaaatgggtaggaatttcaatcaaatgacatgtcacatataaatgtgggctttctctcctgacttgggttatttatgaaagttatgtatgtggggcagaagaaacttgagctgtctaaacttttgctaatgaggtgagaataaggcctgagaaggagaaaaaattgagattgaaacaagaaaataaaagctcctaaggaaactatggtcctttctgctggcaatgtcccttgccagagcttagatgtggggagcgtgaagatgactatggattgggatgtcccatctttgatgccttggggaccagggaaaaggaactgttggtgtgcagtgactggaatgggtatttcatggtttcccatgatgtctgtctgcatgggagttacacaggcatctgtactcttccgtctccatggaagagagttttgaggcatcctctgaattaatgtaaaccagtagtgctccggtgcctgggctgtctcaggagaacaggtggaaacggggtcagatgatgagaattttccattttatgacagcaatggaattcctagaatggttcattagtcttcacaaaagatctattcctggctgggcgcagtggctcacccctgtaatcccagcgctttgggaggctgaggtgcttggatcacttgaggccaggagtttgagaccagcctggccaacatggcgaaaccttgtctttactaaaaatacaaaaattagccagacatggtggcacgcacctgtaattccagctacttgggaggctgaggcacgacaattgcttgaatgggggaggcagaggttgcagtgagctgagatcctgtcactgaactccagcctggatgacaaagagagactctgtctccaaaaaaaaaaagtccattccttagcttagaagaagactacattgtgacattgtttagatctatggagttaagtggaatactcaagtagtttgtttcacttccaatgtttgggatactgaaactttcagggaagaatttacagaatcattgtataattgaattgattacaaaagacatgtacacatttatttgaagcttttttttttttttttacattttctgtgttttcagggtagtcagttatattttaatgtatctttttgttgctgttgttataaggaaaaactaatcatgtcatcttaaaaattgtttttaaaagtttatatactatggctgtaaggatgctttatgtttacatgatgctttacagtattagataagtaataaaaacagtgctacatgtttccatttgctacacacaaccccccgagaggtgagcagtgcttgtcatctgcttttcacagatgaggaaatggggaagtggaggaaggagtggctgcccctgggcacttcactaggaagagatgatggcagcgatgccattcacacatcttatctcatagaatcctcacaactgctagggaagtatcatcacctctactttattgaatgagaaaaatgagctctgggaggttaaataactaacccaggctgatgggtggtgaggctgaactggctcttaaccagtagctttcctgtagtgtcccacaaggaaggagcacactgcatattaaaattattagataacaacattagttttatgatttactaaactcttctcttcttgactctttgacgaaggtaaagtagatagctttcctgaattttttttttaataaaataagacaaatttgtgagatcttaatacttgtctcttgggagagaatgagactaaagatcttaaatattccttggccacatcattcattatctgatgctatttataaaagcatagaacaatcagacaagaatacctataaaattaaaaaaaaaaaagaaagaaaaacatagaacaagaagtttctaatctgcagaactgatgtggctatcacagggccagctgaagatcttaggagtgttagcaaacctagatgatggtttgtttaaccctgggtttggggtataccaattgcttactaagattaatatttcattctttacctttcaaccaaattaggctttctttgttttcatttgttgctacttgtgcctaggctcacattccctggtgggagatgcatagcgggagctttgcttagctactgatataaggaaatttatgaaatgaattgtactatgctgtttcgtgtggttatattttttcagttcaaaaaaaatggcacaagcatgcttttatcctaggtgactgctacattgagaaacttggttgattcatcattagtaagaagtaagttcctaaacatcagtgcccttccccagctctgcacggcaatggaacagtacaagggtgacaaggacgtctgtaccaatattgccagaatattcaggtaggtagactaagacgtgaagtagccttacaaaaatgctaatgcttagatttggggttatctttaatatttgcttgtgtgactggcaaggaatccttttccttctttttacttcgcctaccagaaagggtaaatctagtggcccaagttaaaaatgaacaattcaaacaaatgaacccattgtctatatgattctattgtgattctaaactcattggttgttaagtcattttagttctttggtgagttgtgagctacgtgtgtgtgtttaatcttcctctcagcttatttgagataaaaaactgtatacaaaacacagcaaaccttccagtttgctaggaaataaacaagagttttaactcaaaaaaggggatcaatgcttagaaagtctgatgtgactttgtaatagaaggttattctatttcagctatttgaactttggctcaagctttcactagtcaagtctacacttactttatttcttccagaaataatgatcatttgaatccaggttgcctccaagcaagatgttgttaaatttcagaactgtctttgaattatgcatttctgtttcctcccgcgctgctctttgtcagtatttttacataatgattcttctcgggagcctgaggcttttcttgaactataatgttgtagttgtaaagaaatgcaaaatttcctgaagactgaattggtacttgaccccaggacccctgtataaggatgtgagtccaaatctgatttttttttaaatgaatgtcaacttgtattatagattaaatggtacacaggtttgttacgtgggtaaattgtatgacgtggaggcttggggtctcgacaatcatgttacccaggcagtaagcatagtacccaacaggtggttcttcagccccagccccctccttccctccagatctgatctttttatactgcacttccctgagctttgttctggatacctaattactacctatctaatgcattgtagaatcataaggaatttatttttgtttatagtgtcatgtaggggtccaacttcatatttttcccatgtggatagttgattgttccagcaccttttactgactatgccatcctttctcactgattttgtcaatcagacagaaagttccatataatttcaggtttgtttctgggcattctgtttggtttatcctcagacctgtaccacactgtacttactattacagatttaatttgagttttgctataagatgaatccttcactttttgttgttgagatggggtctcgctttgtcacccaggctggagtgcagtgggcacaaacatggcttactacagcctcgactgcccaggcttaaacgatcgatcctcccacctcagcctccctagcagctgggaccacaggtgcacgccaacatgctcagctaattttatcattattatttgtggaaacgaagtcttgctatgttgccccggctggtctcaaactcttgggctcaagtgatcctcctgcctcagcttcccaaagtgctgcgattagaggtgtgagccactctgcctggccttcaaatctctcactttttttctcctttaagatccaaactcttggtcaggcacagtggctcacacctgtaatcccagaactttgggaggccaaggtgggtggatcacttaagcccaagaatctgagatcagcctgggcaacatggcgaaatcccatctctagcgctgccccccacccccaacccctgccaaaaaattagccaggcatggtggtatgtgactgtagtcccagctacttgagaggctgaggtggaaagattgcttgagtctggaaggtggaggttgcagtaagccaagatagtgccacttgcactccagcctgggcaacagagcaagaccctatctaaaaaaaaaaaaaagaatccaaactcttcttgttcttttcccttccttatgaacttattaatcttgcattgatagctctttaaaaatatttacttatttatttatgtattttagctgtctcctacaggaaggatatccaagaatcttgatgaacattaggactaggagtttgtctatagatgctcttgaattttctatgcatattatctacatataatttttttttcaattattgtaattctttcccctgtcctcatctcttctttattgcattgtttaggagttcaatacaaaattgtgagtgttgagcctgttgtctttcttctgactttaaaggaaatattttcatggtttcactagttgaaaataatatttgttgtaggttttcctaactaccctttagaagattaatgattttttttctcattagtgggtattaagttttgtcaaatgcttgccctgaatcttttttttttttttttttttttgagttggagtcttactctgtcgcccaggctggagtgcagtggggtgatctcggctcactgcaagcttcgcctcccaggttcatgccattctcctgcctcagcctcacaagtagctgggactacaggcacccacaccacgcccagctaattttttgtatttttagtagagacggggtttcactgtgttagccaggatggtctcgatatcctgacctcgtgatccccctgccttggcctcccaaagtgctgggattacaggcgtgagccaccgcacccggcccccacccccttttttttttttttaacttttattttaggttcagaggtacatgtgcaggtttgttacataggtaaactcatgtcacgggagtttgttgtacagattatttaatcacccaggaattaagcccagtatccaatagtcaaaagagttatcttttctgctcccctccctcctcccaccctccaccctcaagtagaccccaacatctgttgttttcttctttgtgtttataagttctcatcatttagctcccacttataagtgagaacatgtggtatttggttttattttcctgcgctagtttgctgagctaatggcctccaggtccatccatgttcacgcataagacttgatctcattcttttttatagctgcatagtattccatggtgtataggtaccacattttctttatccaatctgtcaatgatgggcacttaggttgattccatgtctttgctattgtgagtagtgctgcaatgaacattagcgtgcatgtatctttattgtagaatgatttattttcctctgggtatatacccagtaataggattgctgggttaaatggtagttctgcttttagctcattgtggaatcactatactgctttacacaatgattgaactaatttatactcctaccaacagtgtatgagtgttctcttttttctgcaaccttgccagcatctgttattttttgactttttaataatagccattctgactggtgtgagatggtatctcattgtggctttgatttgtatttctctaatgtatttgtatttctctatgatactgagctttttttccatatgcttattggccacatgtgtgtcttcttttgaaaagtgtttgttcatgttctttgcccacttttttttttttgagatggagtttcgttcttgttgccaaggctggagtgcaatggcatgatctcggctcaccataacctctgcctcccaggttcaagcaattatcctgcctcagcctcccaagtagctgggattacaggcatgcaccaccatacccagctaattctttgtatttttagtagagacggggtttctccatgttggtcaggctggtcttgaactcccgacctcaggtgatctgcccgcctcagcctcccaaagtgctgggattataggcgtgagccaccgcacctggccctttgcccactttttggtggggttgtttttctcttgtaaatttgtttaagttccttatatgtcctggatattaaacctttgacagatgcatagtttgcaaatattttctccaattctgtaggttgtctgtttactctgttgatagtttcttttgctgtgtagagctcttaaatttaattagatcccatttgtcaatttttgcttttgttgcatttgcttttagtgtctttgtcatgaaatctttgcccgttcctatgtccaggatagtattgcctaggttaccttccagggtcttcatagttttgggttttacatttagtctttaatccatcatccatcttgagttgatttttgtatatagtgaaaggaaggggtccagcttcagtcttctgcatatggctagcctgttaccccgtgattatttattaaacagtgagtcttttctccattgctttttttttttttttttttttttttttgttgagacggagtcttgctctgtcgcccaggctggagggcagtggcgcggtctcggctcactgcaagctctgcctcccgggttcacaccattctcctgcctcagcctcccgagtagctgggactataggtgcccaccaccacgcccggctaattttttgtatttttagtagagatgggttttcactgtgttagccaggatggtctcgatctcctgacctcgtgatctgcccgcctcggcctcccaaagtgctgggattacaggcgtgagccactgcgcccggcctccattgcttgtttttgtcagctttgttgaagatcatgtggttgtaggtatgcagccttatttctgggctctctgttctgttcccttggtccatgtgcctgtttttgtaccagtaccatgctgttttggttaccatagccctgtagtaaagtttgaattaggcaatgtgatgcctctagctttgttctttttgcataagattccttggctatttgagctcattttcagttccgtgttaaattttaaaatagtttttttttttctagttctgtgaagaatgtcattggtagtttgataggaataggattgaatctgtaaattgctttggtcagtatggccattttaatggtacaaattcttcctatccataagcatgggatgttttcccatttgtttgtgtcttctctgatttttttgagtagtgttttgtaattctcattgtagagatctttcacctccctggttagctgtattctcaggtatcttattctttttgtggcaattgtgaatggaatggcctttctgattcggctctctgcttggctgttgttggtgtataggaatgctagtgatttttgtacattgattttgtatcctgaaactgctgaagttgtttctcagctgaaggaggttttgggctgagactgtggggttttctagatgtagaatcatctgtgagtgttgggcctgttgtctttcttctgactctaaaggaaatattttcatggttacaccagctgaaaataatatttgttgtaggttttcataagtacccttctgcaaacagagatagtttgacttcctccctttctgtttggatgtcctttatttcatcctcttgattgattgctctggctaggacttccaatactatgctgcataggaatggtgagatagggcatccttgtcttgtgctggttttcatggggaatgcttccagcttttgcccatttagtatgatattggctgtgggtttgtcatagatggcacttattattttgaggtctgttccttcaatacctagttttttgttttgttttgatttgttttttgagacggagtcttgctttgtcgcccaggctggagtgcagtggcgtgatcttggctcactacaacctctgcctctcaggttcaagcgattctcctgcctcagcctccagagtagctgggattacaggcatgtgccaccacacccagctaatttttgtatttttagtagagatggagttttaccatgttgtccaggcaggtctcaaactcctgacctcaggtgatccacccgtctcagcctcccaaagtgctggattacaggcgtgagccacctcgcctggcatcagtacctagtttattgagagtttttaccatgaaggagtgttgaattttactgaaagccttttctgtgtctattgagataatcttgtggtttttgtcttcagttgtgtgtatgtgataaatcatatttacctgaattgcttttgattatgcattttcttatttaaatctgttaatatagtaaattacactaataaagtttctcaagttaagccattatatattgctgggtttggttaactaatattttgtttaggatttgtcattggtggtcatgagttacattgacctgtatttttctcttctcatattgtccttgtctgggtttagtgtaagtttataccagcctcataaaatgggttgggaggtaatccaattttttctctttcctagaagaatttgtaaaaagctgatcggcttcttgaaaagttttaaaaacttgctcaaaatgctatttttatccagggtatatatgtgtgtatgtgtgtgtgaatattgttgactactgattcaatttcttcccatatggttatatgtttctcatttctacttggttcagtttcaaaaagttatgtttttgtaggaatttgataattttatctaagttttcaaacaatataaaagttgctccaactattctcttattattattctaatctctgttttatctctaattatgtccccttttatttatttttcctatttaacagatatttgtatagcacttacaacatgctaggcaatattcagaatactttccaaatacgaattcctttcatcctcataacaactttttaagatatgtattattattgtcattatcattttacatatgaggaaactgagacatagagaagtttagttattttcccgagatcacacaactagtatgtcatagagctgcagttgaaaccgtatcctggctctagaattcatactttgaaccactgtgttaccttgcctcttcattgttaatattgactttctttcctaattttgattgttcgtgctgtttctctttttcttagtcttgcaaaatctttcctattttattagcttttaccaagaacaaatatattattgatccactttattgtatgtttgcttcctgtcttatttcttctgctcttatccttattaatccttttcttcaactctctgtgaatatatcatatttttcttctattttagtaaaaaacatgactcctttcttttcagcctccttaaacctataaattttcctctaaatactaattagaggaaatgagtatttataagtttttttgttttttgtttttttgagacaaggtctcactctgtcacccaggctggagtgcagtgttgtgatcttggctcactgcaaccttcgcctcccaggttcaagcgattctcctgcctcaacctgcagagtagctgagactacaagcatgcaccaccacacccagctaatttttgtattttttagtagagacggggtttcgccatgttagccaggctggtcttgaactcctggcctcaagtgatcctcctgcctcggcctcccaaagtgctggggttacaggcgtgagccactgtgcctggcccatcctacaagttttgatttgtaatattttttattactcgtatttaagtatttcttttgtaattttcatgtttctttgacctataagttaggtgttcttacatttccaaaaaaaaggtttttttaaatttattttttaaatgatttctaatttaattgcactttgaccagagaatgtggtctttgagataccagttctctgaaaatttactgagatttatttatggcctggtatgtggtcaagtttttaacatattaatgatgttttacctattgattcatcaattaggaagaaatatatgaacatctcctgatttgttgtgggtttgtcaatattgccttacgggttttgtttgcttgcttgcttacttgctttagaaattttgaagctgttttcaaggctttctgccttaaggttggtttattttgcctaatattagtatagcactaccaatctactatattaaagcaggtttttgttcgtttgttttgaatgtataggttttttgtttgtttgtttgtttgtttgttttgaggcagagtctcgccccattgcccagtctggagtgcagtggttcaatcttggctcactgcaacctctgcctcctgagttcaagcagttctcctgcctgggcctccagagtagctgggattacaggcacatgccaccatacccagctaatttttgtatttttgtagagatggggtttcactatgttggccaggctcgtcttgagctcctgacctcaagtgacccacctgcctttgcctcccaaagtgctgggattacaggcgtgaggcaccacgcctggcctattaaagcagttttacatttgcttctgatgtggtctcaggggactcactggtatccaaccagatttcatataaatttcatgtaagtttgtgttttctgaattacgtgggtagtgtacacctacatgtaagttaccttttaaatttttccggatccatctcactagagtgtagagcaggaagcctccttgcagcttctctgaactgatgtgtagagtatttttagactccttttcttgaactgggcaatgttttgaaggtctgcatttaaagtgatactatgtgtacttgaattttatagaaaaacaaagtttacctttattttcccatttggcatttctgcagcaaacttacttcttaccgtgactgctgcacagccttggccagctattccagatgttatgccttatttctgaatctaattaacaaataccagaagaagcaggtcagttcttcattcatttaattcttcaatgagtctttacactaatgtgtttgtgtaagcccatgttaaatgtctttatgttttgagtatataggtttctataagaaacttccattaaatgtataatgggctgtcctgggaagcagtaagttacctataggagttgaaggagttatatgagtcagaaatgaaatgttgatgttctaggaagtttcctggtgtaggaaggaaggtggtagattataacaatatttttcctcccagtgatctgtagaaaacctacctgggagtcaccttggggtgggggagggggtataaccccaccccaagggttatttccgtaatggttatttcttccaggtttcattccagtctactgagtcagatgggtagggtaggacctacctagccatctgcattttaacaagaaccacagggacttctgatgcaaattaaggtttgcagttcccctgcactggatagtccctgaagattcttctagcccttaagttctctaattctttgaccccattgttatatttaaaaggtaacatttccaggtaaagtgtttaaatgaaataatttagttttaatgaatcaaggcaaaaatgtatatagttgtttaaaaaaggaagaacttacaaacgatttctcattaatcaaatcataatatttcatacagacattatttttatttttatttttttattttttgagacgagtctcactctgtcacccaggctggagtgcagtggcgatatcttggctcactgcaagctccacctcctgggttcacgccattctgccccctcagcctcccgagtagctgggactacaggcgtgccaccacacctggctaattttgtttttgtacttttagtagagacgaggtttcaccgtgttagccaggatggtcttgatctcctgacctcatgatccgcccaccttggcctccctcccaaagtgctgggattataggcgtgagccactgcacccggccacaggcattaatttttattataagtttttaaatattcgttaaagcaaagtctacttttattcactttcataagttattaaagtgacatcaacttagtgagatattttgtccatgaatacaatgagtattcattttaaatgtggtaaattttcaacatcctatagtaagttttgcgagtttatggaccaaataatttatgtatatactaacagtattttaatctgaagctttgtgtttgttttgttaaccatattaagaccaccccaaaacataatctctgtttgttactgactagcattgaacttatctttacccagccaaagacttctgctgagaattattaaatttgtcagatttaaccccagctttagcctcccaagtagggattacaggcatgtgccaccacacctggctaatttttttttttttttttggtagagacagggttttgccatgtgctgggattacaggtgtgagccactgtgcctggcccaaaagaattcttttacatgttatactcaaaagagatctatttatatattttattttataatttaatgttatgaattttaattataattttattttcccattactaccttttttttttttttttttgctttggtgctttgatcttgggtgatttaggtgtctttaattagagaagatttatttgccttgccattagaattttcaaatatggacaaaagaaaatacttctgtttaacagtttgatttcaagttatgttataatctataatttttttaaggaagaaaattcattaattgagtactcacaaatagtgctattgttttctagcattactaatagatacttttgtttctctgattggagcttagatgatggccatatggaataaaccaacaaaaatcctggtacctcaccaatatgagagactagagatatcagtatggctaagagtatgctttttctagtttgagtaactaaatgtcctaaagtttttttttgttttttaaaataaagatgaggtctcactatgttgcccaggctggcctggagctcttgggctcaagcaatcctaccacttcagcctcccaaagtgctgggattacagatgtgagccactgcgcccagcctaaaaatcctaaagtttaaattggcataaaattttactatacttttcactaaactaattttcacgttagaccaatggttatctgaaaagcaaaactcatgtttaagaaaccacatttttctctgttgatgtatattacaattttatgttcctattgatgtggtttggatttctgtcccagcctaaatctcctgttgaattgtaatcccctggattggaggtggggcctggtgggaggtgattggatcatgggcggagttctcacggatgggttagcaccatccccctggtgctgttctcgtggtagtgagtgagttttcttgagatctgcttgtttaaaagtgtgtagcacctccccctgctctctctcttcttcctgctctggcatgtaagatgtgcctgtttctctttcaccttccgccatgattgaaagtttcctgaggcctccccagaagctgagcagatgccagcagcatgcttcctgtacagcctacggaaccatgagccaattcaatctcttttcttgataaattatctaatctcaagtatttatttgtagcaatgcaagaacagactaaaatacctattaaaattattttaatttccaaagaggaatagagagcaccttgtaaaccatgtacagtaacatgcttattcagaaccatcaaagaaatgcatgttatcactttcatcactaaacttaatcattgtggcaaaaatcatattcaaacatattgcatgtttctcttccttcttagaagatattaaaactaacttaacctcttgataccaaaggtcattattataagcattaattattgctgtagagactgtttgtcccacatgtgaagcctgagtctgttgatgaggttctttaaatgtctgcatcttctttgtagattttctctctcttctttttctattggttgctacctccacctttggtagtctttacctgcttttttgcaattatttgtttgcaattagcaagggaacctcataaccaagcttattaaaattagcatgtagtcccagctactcaagaggctgaggcaggagaatcgcttgaacctgggaggcagaggctgcagtgagccgagatcgtgccactgcactccagcctgggtgacagaggaagactctatctcggaaatcaaggacatggacacacatggagtgaggttaactgcggaggtttaataggcaaaagagagaggagaacagctctctctcctgcgcgtgagagaggcacccaagtggaacttctggcccatgcacaggtattaatagacaggcttgaggaggcaatatctgatctacagagggcccaaagattggttggaccaggtgtgatgtttacatagcacgcagggaaggtggccaccccaacctaatcttcttattatacaaatggtgtttttgcttggccagcaccatgttacctgctctttactgtacatgtggctagcaaagagaagggaagatggagctgccatagtggacatgcctagtcccaggtattctttttcctattggcacagctggcagcattcacccgtggaagcttctagcttgcctttctatgtctgcagcttgattttacaggctgctctttattagaaaagaaattatttgggggctgcttttcattaaaaggaaaaccttaccgaggacctccttaccctcactatctgcctaaataatttctttttaactccagtatcaacacataagccaggcgtggtggtgcaagcctctagtgaaactagttgtccagcttggcaacaaggtgaaatcctatctcagagagagagagaagactggcaacatagacctcatctctataaacaaaaaattagccgtgcgtggtggcacatgtctgtagtcctagctacttagaaggctaaggcgggaggattgcttgagcccaggttgcagtgagccattgatcactagctagctagctagacagacagacagacagacagacagatattttagactaaaaactttaaaataaaattgaatatgaacagacttaatgagaagagcctaaggggctctgatgaaatttctctgtgacttctcctcttcaaagccaattccatatttcaagttgtagctctcttgtctgctcccctgtgaggcctcccaagcaagaccagtcaatttctccctcatcagtgcaacatttttaagactttaacatagctgatacccccagctagtacactcagagctaagaacccaagcagtatgcctatggccttaaccacttcactattattaagaaaaactatacaaatcttagcgataaggtatggaataggtggaggcatgtcctgacaaaggcatgccagggcattgtttaatgacccaatcagggattaattccctaggccaacatattggtgtttgaacttgctgtttactatttggttagataccagacacaataaagttacatgttaatttgtaggtttcaatctggtagacaggatcacctcaaaagttatggttttattactttgtaggcatttgtcaggtttgtatataacccagaaattttaagtgcttgtaaattcccggttcttcagttgtgcttggaacaaagtttaccgtggtatcggccccctcattaatgagttaaatacttttgaagtgtgttcattttatgagcccatgagagtcatgtttttaacttttaaaaaattatactttgactcaatacttttacttataataaagattgaaatgttgtagttttaagtcattactttgatttttttccagtaagaaaaatacataatttatattttcctcaaaaccaaaatattttagaagagcagggaaagagtttaggctacaaggaagtagttgtgtgtcccaaccacttcctaaaatcattaaccagaaattcccataagtcttcataaacatttctttagtggttctccaaatggttatcattatgcagctgccctatccactactgcgagttcctaaacaacacagactttgtcctgatagaccgagatgatgcttggcaaagtaagctcataagtgctggaagaaagaattttgagtgtgtgaaatgctttggcacctgtaaggtgttaaaaaatattttttctagtactcgagtgcttcttccttaaatatgtactttcttcttcctagtttggaggaagaaataataagaatttttttcccacaattttcacatgggtgggctgccataaaaagcaaaacagaatcccttcagaccagcatggcatcttagtttcatgtttcccatgtcccaggtggccgatcaaatatgatttgtttttcctcttaatgttctgatgtgagtgtattgatctgcagtggttagacactttgccgcaactgggatttacttgaatgttgaggcttggaactgattgtggagacctgaatcagccttccagcaacttatttaaacagaattattacttcctataattattttttttttcagctcctggaaacatccctgcaagactaacttgggttgtagagaaatactctggaagctttgtagtctcttaatatacacagccattgccaagtgattagacaatcagaaagagtcagtagaccttccctgtttttgttctgggaggttagtattgcttctgtcttgaaagcctgaggactacatttaggatcagcataggtttcatttttctaagacacacttttaaatcaaatcatgtttatggctaatcgcgttttcaaaaaacatagaaacagaaatctaaaatgaacaagaaagaaaagaaaaaaaccctttatagtgataaatgaaatgtcacctacacatgcctcttgaactgatcttatcagcggatggggagcttcacaggaagctgccggtcgctgctgccgtccacagagggggaaatcctgttttgaaccaggtagcaccagggccgtttgctgttggaagaagtagaatatttcctccccatctgctgttgttttccattaaaggggataaaaattagaattacatgagaagataccaaaagtcacaaaattttccattatttttacattctttttctcttgtcaaggtaaagtctgatttcaacatatgagaagtctgaatatactttatatattcgagtatataaagtctgaatcaagtccatcgacaggaggggttgtggtgtggtttcacttttctatacaactgtgctgtgaggggtattgatgaggaataaggatttatatttacaagaattcatattattttttaaaaagcattattataaagacaaataatgggtattcaagtggtgagatttctaattttttcttgatttaaatcagagtggctccccaacttggcttatcatcagatttgcctggggagctttaaaaatacaggtgcttagctgggcacaggtggctcagattggcctgtaatcccagcactttgcggcagatggatcgtctgaagccaggagttcgagaccagcctgggcaacatggtaaaactctgtctctacaacaacaattaaaaaaaaacccacaaaaattagctgggtttggtggcccatgcctgtaatcccagctacttgggaggatgaggcaggagaatcacttgagcctgagagaaggaggttgcagtgagctgagatcgagccactgcactccagcctggttacacagtgaaaccctgtctcaaaaaaacaaaacaagacaaaacaaaaggaacccttaaacctattttcaacttaaaatttgagtttaattaaaaatttttttaaattaaaaatagaaatacaggtgctcaggccccacccagagagattctgattcaggtctgggatggggcccaagaacctatttttaagagacttctcaagtgactcaaatgaacagcaggttttgagaccctatggtttaagttattaaggtggttctttaaaaccattttctccagtattgacagcagaggggttcccataaaacctcaaaagattttaaagtgattaatcaaatcagccacacagagtcagtctttctctacaggagcagagctgacagtgattcttcctgacaaagtaggaaccaagttgacaagacccaccaggtgctaatgtaggcttcccagtaagtggtaagaaccactggccctttgccttttgcacaggcagctgaggaatgatttcttagctggagaacacaggatggtacattagtcttttccacaaattttcgctgccagacttgtgtcaaaataagtcctgggaccaaatctagtttgaaaaaggtgctcatcacactgatgaggcttcaagcactggccagagtggctccctcaggagagatgggcacaggctctactcctcaggacccttagagccgcctgtccaagggagggtgccttcagttcagttggctagacaagctgcgagttgctgattcatttgttagtgaaacaagcaccaaatttcatctttaaaataattcctgcagatatcgtgttttgagacagttcagtatatacccatatctaaatgttgtagtttgcaacagttaaattgagagtgatgagttcacttagaatatggtccgctttacaccccctctgtttgcataatggccctcagtgaagtgggcctccgtttccatctgtatgtgatggttatgtgcatggcctgggtttctggctcaccaacagtctcaatgaaaaggcatctactcctcccagctctcataaatgacttccgcagggagagcaagggaaacttctttggctcatatctgtgtggttaatttgtccaagatccatgatgcaactagtaactccagttcccacacacacaaaaactgagatgaaacagcctctcgttcggcttaatgccgtatgaaagctaaactttagagttaggtaaaatatctattaaaaatgctggccaaaattcaattaaatgacaaatctcatttaagaaatgtgcacatattgtctgctttatggtgtaaactgcttttggtacaaaacaaatgtgcaagcagatgggcttaataacgaaggagggagtggggttgctatcagcctttgggaggcagagcctgcctcaggaggcgcctctgacgtcagtgttgctacatttagcatctcaggaaaatacatttgggtttgttttttggaagaacatgaagggattttccccatttcttctgtaaatatctactaggcaagagatctggtaaaatgcctcaaataagactttcaaaagactggcaatattttgcaaaggtcatgatcaaaaagaacaacctttgtctacattcctatcacatgtgtccattgaccatttaactctctccacgtttagatacggttaatttcttgtttcttttaccacagagcttccagatgcagcaggactgtcgtcagagcctttgcaaaccctgggaactgccagactcattcttggttgtgctgcttttaaagtcctacctctctcattctgtttagacttctataggcataagctgctgtcttcagccatgtatgcacagtgaacactgatttggaatgcttagccatcgtggtatcagaaatgagagctggaatgtctgaacagtgtgggctgaaagcaaaaccacctccatttttctagctgttcatcttgaatgtgaccacagcctttcagcattccagagaggtgccttctcttccccgctatcctctttgggccatcaaggattggttaggaaggtgcccccaccccttcccctggtgcctttgtagggcgacttggctcccagcttgtcctctgcctcctgcctgacaggagcacgccctatggctgtcttcccagcccctctgcaggcacattcccagcgggtgctgagagcatttggctgagcttgctccttttttcagccttggccttggtctgcgcccctgaccgggcaggctgtacaatacgcccttagcttgttcattctttccagctcctgccggctttgcccttgtggaactggctcttaccccgctcagcacggaacccaaatgcctgatttatgtctgctggcttgaaaaagaacttagcacagtgaaattctagcattggcctggtacttttgagtgacattcagaggcatatcgtgggtgctcaataaatgattgctgatagaacagatagatggatggaggaatcaagcgtaatctcttctggttttaaaatgattttctacttagattcttggctttgagtctccaacatttcagattcttcgattttatctagttaaacacgtaggcaaactcttgacccactttcagtgccctatggtcagttagcatttttgcagtagtgcacagtctgtcttccagtttgctaaaatttatctgttcttcaagccacctgcaagctcaattaatgtttgagttttgtttgagggtggtaagttggataaacaaagcaaattgtaaatcctgattcagctctcaggcacgagaagtttgtaaccatattttaaacagggtattttgattaattttctggttaatagagagttcggattttaagtatatttacatccccttccatttcaacccattcttacaaatttttctaaaatgtgttcctttacttagtggaagcagttccctcctaagtggagtctgctgaacatagtttattctttctgtgacagcttgatattgtttcttccccacagtcaacattatgcacatgagttattttaaggtacgggaggaagggtgtgggagtcggggaggaatgtgttcactgtggctggccatgggcagagagtaatgtgaggtagcaaagaagtggttgcgtggggccagatgatgcattagatgctggctttgacattcatttaataggcagtagatgtttttgagcaaagggaagagctgtgctttaagaagtggtgttagggttgatggcagagggaggagcctggaaagggcctctgacaacagtctacaggcagattagcccaggtcggcatgggcaggagggagctggggaacattttgagatgacagagtcgaggagacttggtgactgcttggtgaggggatgagatagagaggaatcagagatgctggggctgggggactgggaagatgatgatgattagcaatgaggagttgggctgaaggtggttttggaaaccatctgtgtgtacagagatgattgttcaagtcctgcctcttctcttcaccagtgtttgactttgggcttacttaatgagtctcctgaagcctcagtttcaacatctctaaataggggtaaaaatgtctttcattggctttaggccaatgtctctcccatggaaagtaacatgcaacagctactgccaatgctgccaccattggaactggacatagaccatcctggtgagcagtgccctgttcctggttttattccagttaaagtaatttcattcacaggcttgtggggcccattcagattgagtaacttgtttgctcattggggcataacatctgcgaaactaatgacaatatccctcaggctctaactggaaagctctgttgaggtcagtcttcttcctctaagtgtatctgtttgtctaagctctggttggccgtagctgttgctaggctgattctgttttaagcaaaattagaaagtcgatatgaactggttatactagactgccttctttaggaaaaaaaaaaaaagctctctcttgattcatcttcagtttgctatttcaaaatcacatagttatgatatgaatatgcaacattgtgttaaatttaataaaaatgctataaaaatggagtgttaatttatagatgattctcagatattgtctaagaataaaggagagaatgtgtgcctcaaaggagagctgcatattgatgaaatccttttccgctgtggaattggtgctctctctaaatagatgattttggccttggtttaatttttacaaatctttatagaatattaagtaatattttatagacttgagatggctcgggctgtggaacagtagataatctctccatgatcctgcccaacgcagaccttggttcagtagggaggaccttggagtgcacggtttgggagcagaggccacccatggtgaggagaggggccctagaaagctgacttgctcagccttcttcaggattccagatgagtcaagacaagccctggcatggagataagaaaacactacctctgctgacctcctgtgagatggcttctattttggcctcttccaggatccctaggtccatgtagaatatatttaagaagggaggggaaaaaaagaaaagaaaaagtgccttagctaaccctgaaaaacaggacaaaaacagtaagcagagatagcagttgctggaagtttggtgctgcagacggcgcaatctgccatcccatttgttgatctcgcatgccatgcttcagttggcaccgcggctgccaggaaccaccccctccttttccatctgaagcaggaaaagcagtattataacagtgttaactcttcctgccctacagcctagagcttcttcttctgcactggaggcttactaatctcggccacgttaggacctacagagatgacagaatcgaagaattttagaagaggaaggggcctgagggaatttttagaaaaagaaaagcagcacttagtcttcccagattagactgcatgtgacagtggggagaggtcatttgaattttgaagaatgatgaccactaaggaaatctattttttaccaggatctgatctaaatcctggcaaatcaacacggatagctggaggtgggacagggctggagaagcctactgagctggactcagagaaaagcaagaccaggtagatggaggtgaaacggcaaggcctaggaagaaaaaaaacaatccagcacccttagaagatgccatgacattttaggaggtaaattgtttagtcctggtaacaatttagggtacaaaatgcaaatattaattaaataagcaatcacttaaaatcactcataatgcctttcctgtcttgtttaacatgcttttatggaaatgggagaagagagcccaattccaggaacatggtgaagtccaaaacttattaacatcactgttatcaaatgtgcgagggagatggcggtttagattgtaaaagatactgtgaatagctttattcaggttaaagaaatggaagttatcatttttagtgaattagttaatttgtatatataaatgcttaggacaatgcctggcacatcatgagtactaataagtactgtgtgttagttgctgctgttactgtgctgttattgttattaattattaggattttcagaactagaattcatatagtctttcagcaggaaacatgtatcaaagttcacacaaaaattctgtttatagtcctcagcttagaaaatatcagatgaagttcttctttaagatgcttaattcttggaaataccctctgtcctggttggaaaactgattttctgctactctgttgggtctgatcagggtggaggagaagctaccaactcagagcccagggcagggcctttgccaccaggcattacttgaagtaaccctctgttttatgtgaaatgggattcaagtattataatcaaattgtgtgtgcttgttttagacttaaggcccataaatatcccatagcttctttagggaacagtcaggtaattaaagaatgagaagatgacccctggcccaggaaggagatagtcccagatgctctctcaaactaatcctcttcaaactaaaaacaggccgggcacagtggctcacgcctgtaattccagcactttgagaggccgaggtgggtggatcacttgaggtcaggagtttgaggccagcctagccaacatggtgaaaccgcgtctctactaaaagtacaaaaattagccaagtttgatggtgcatgcctgtaatcccagctacttgggaggctgagacagaagaatcacttgaacacaggatgcggaggttgctgtgagctgagattgcaccactacactctagcctgggcgacagagcaatactctgtctcaaaaacaaaaacaaaaaaaacaaacaaacttagaaccatttgacccagaaatcccattattgggtatatacccaaaggaatataaataaatcattctatcataaagacacatgcatacatttgttgattgtagcactattcacaatagcaaaggcatggaatcaacgtaaatgtctatcaatggtggattggataaagaccatgtagtacatatacatcatggaataccatgcggccataaaaaagagtgagatcatgtcctttgcagaaacatggatagagcaggaggccattatccttagcaaactaacgcaagaacagaaaaccaaataccacaagttctcacttataagtgggagctaaacgatgagaactcatggacacaaagaaggggacaacagacactgggacctacttgagggtggagggtgggagaaggaagaggatcaggaaaaataactattggatagtaagcttagtacctgggtgacgaaataatctgcataccaaagccccatgacacaagattacccatgtaacaaaagtgctcatgtacccctgagcctaaaaagttaaaaaaagagagagacttgtcttctgctgcctgcccaaccccatgctcccttccacatatctctgcatctcacagcttccaaggttgaactcagattctttcatgataactctgctgaacctgacactgttcccagagcatcctcttttcaaaactctggtgagactactaggcctgtgccactgagtttattgctattagttagcattttattgataggacatgaaaagagttcacagaaatgcccgaatcattgctcagtacaatttgtgctttgcctgttgtatctcatgtgatctcacagtaagaattttgtctccattttgcaaacaagttaatggatgtacagagaggccaagcatctgtgtgagtccagcctgcctggctgtgacctgggactcataatcccctttcacgtctcgcttcttcctttgccgttttagtctttgccgtttccccacatatgttagccttgtcttctcagtaggtgagaagctcttcatagcactgactttcagacttggttatgtgtgtgtattcctaggccctggcattaagaacttacctgaggactaacattctatttcccggggtggagtcaggagcagggtctcctaattggacgaccactatggctggttgaatgctgtgagttgaaatgtctccgaaaatgaactctctcctggaccatctccagtttttgctgtagcattagctgctgtccttccttaatgtttggcaaatggtttccggttgtgcaagcagcagcctcgcttcttctctgccagtgagtgtcagggaaaacttttggattttttagcaagaacaagcaggaacaagttggtattggcagagaaggcctaggtaaatccaaaagttgtactctgcccccaatcctccccagtttcctggccacacccgacgcccctcacggggcccctggcgtcgcacctggacatgcgctcctcgatgaaaacgtgcccagcccttggccctttgtccccttttcttaaggctactgctaactactgatctgatcaacaaagtcacgtttatggtcgtcccttctggtgacatatttgcttttaaaaggagataattctttaactgttctgcaagaaggcaaaggaggagaaaaagtacacgacaccctgtgtgggaagcagatgttggtgtagaaaggacactagagtctgggtcaccctggaatcaaatcctgaccttacccttcaccagccatgtgacctgggcagcttctccaggccctagtttcttgtctataaaatggcatagtgcctggcactgtatatatagatatagatataataccatccaggccagttgtagccctccaatgagtattcctttaaaatctcctcctcccaggtcacctccattgacacccatggggaaggctgatctggactcatatgtggacattgttgtcaaactaaaaacacagtgatttttgtatcttgtttagttttaaaatgttcccagcttagggtttgtaaaaacattttaaaattgtgaaatatagcctatatacagaaaagtgcataaaacgggtatgcacaatttagcaagtaattataaaggtgtcactcatgtaaccaccaccctgggtaagaattggtaggtactgccttaaagtagtgtagctacgtaacacagcgcttctccacagggggcaattttggctgtcacatctggagaggtgttgtcatctagtgcgtggaggccaggtgtgctgccaaacgctctacaatgcacaggacacctccccacaacaaagaattatccagtcccaagtgtcaatcctgcccaaattcaaaaacaccatacttcagcaggagacgaaattttaaggaaagatttggaatttcaagaaaccggctattgtcaaaacttagatttacatgactcatttttagtaatgctgtcccactcaactaattgttctctgaaggagataaagaaaggcgagccagaatttaagatgaaggatctgaaggtaatagacgttgctgatcacatcaatcagtttgtattctttcattgctgccaagtgcttttaatctcctttgtcactttgcactgatcttgagaatcaaatactgtacaagtgagccgaagccagacgtgttccattttactattaatgcaattgtgaataaattaaatactatcttcttccccacgatgtgttccagccccctttgcacttttgactctgtctttcgtttattgcaggatttagtcgtccgtgttgtttttattcttggcaacctgacggcaaaaaataaccaggctcgtgaacaattttccaaagagaaagggagcatccaaactctgctgtcattattccagacgttccatcagctggatctgcattcccagaagccggtgggccaacgaggcgagcagcacagggcgcagaggccgccgtcagaggcagaggacgtgctcatcaagctgactcgtgtgctggccaacattgccatccacccgggcgtgggcccggtgctggccgccaacccggggatagtgggcctgctcctgaccacgctgggtgagaaccgcagcccactggctgcagcagacacaaccaactttcccgcggcccaaagacagttctgtgtctgtggtgtgatgaggattttattatcacaagtggctccctatgagaaagtcttagctgtatgaaggaaattccctcttctgttcagaactgtcttaaaagtaatccagattattagaaaaggaaaagaaaacatagtaatagagattattactaaaacccaccaaatcgtacactttaaaagggtgaattttatggtttgtgaattacattgcaattttttaaaattatactcagcaaatgaagaaaacttggctaaactaaccacaaagagtttaaaattccaaatatttgagtttaaaatcccaaatcccaaatattgtgggcaatccacatgattaaaattaattccttttttttcctcttcaggttcttacattatttgtaattacagtctccagtcattcaagtcctgttcattccccttgtattagctcagattgccataacaaaataccacagattgggcaactttgtcagaaatttatttcttatgcttctggaggctgagaaattcaagatcaaggtgccagactgttcagctcctggtgagggctcttcctcctggcctgcagacagccacctactcactgtgtgctcacatggctattccttggtgcaagcacttgtggggtaggggacagtctgtctctccccctcctctttttataaagtcaccaatcctatcatattaggaccctacccttatgggctctgtaacctgctgtatctcttcaaagtcttatctccaaatacaagcatattgggagtagagcttcaacatatgaattttgttgggcacacaattcagtccatggcaacccctatactttttaggtctgtcatctcccacaagcacttctgcctgctagtgtgtaggaaaattaactgcaacccaagattgattaatcttgccactattaggtgggcctggtggctcaggcctgtaatcccagcactttgagaggctgaggtgggtggatcacaaggtcaggagtttaagaccagcctggccaacatggtgaaacccctttctctactaaaatacgaaaattagccaggcatggtagcattcacctataatcccagctactcgggaggctgaggcaggagaatcgcttgaactcaggagacggagggccgcagtgggccgagatcgtgccactgcattccagcctaggtgacacagtgagactctgtctccagaaaaaaaattagctactactaaccatacttgtggaaaatgttgttgttttggaaggaagctaatgtctgacacaaatgatgttttggaggagcaatctgtgaactccctggcctccctcgcccccactagtcaactcaagagccatttcctaagctctttctgggtaaccagttctgtgctatacattcagtttcatttattctgctcaggctgccataacaaaatcccgtaaactggggagcttcaacaacagacatgtattttctcacagttctggaaactggaagtctgagaccgagatgccggcagggtcagggtctggtgcaggctccccttcctggcatgtggttgattgccctctcactgggtcctcatgtgctgaagagagcacactctggggtcccttctacttcttgtaagggtaccagctccaccggatgagggccccacccttctgacctcatttaacctttatcacttccccacaggacctagctccaaatacagtcacattgaagggatagggcttttacatgtgcattctgggggataccaacattcagtttagaacaaggttttaaaaatggaggctggtatgtgctttcaaggaattcggcctatatggtggagggacattgagtgcacagacaagaaccccagtttctgagaagggcagaagctaggcatacacagctaagggacgggtggcagagcccggctgcgggcatgtgagtgacaaggccgtgcttcattatggagctttacggttgaaaacgcattttcatatctgttacctcacaacaatgtcagggcacgtttttgttattttcatcatttcacagatgaggaaacgggctcagtgagatatagtgactttcacaggtcacaaagttagcaagtggcaaagtcaccgggcccctgacctgtgcttccccgcactccacatcacgtgtcacctgtcttgagaaacgactcttcacttctgattgggatctgcaccatgacttaccacttccatgtaaataactcaaaaatctctgtgtttaggcttgaactcttttccaagctgctgactgcacattaagccacgtggaagaaaatgcacgtagctgtgagagaaattcagtttctgttccaacctcaaaacgttcagcatttgctctgtagcatgcccatgtctgctgaagctctttccccttcctgagatccactcaccacactgagcagggcttctcagcccaggaccagggatgggactgctgcagaatcagctgtgggactctttaaaataccctttttggtttctggcccctgcccagaaactgcctctgtaaaatgccattagagtcttgaaatctgccttttaatgcctcctttgcccccaggtgagccttttgcccattaagtgttgagacccagtgcttcagggaaccatgttagcttttctggctcctcaggatctagcagaagcctgaaaccgactgggcgaattctcatctgttgcagaattaatccctttacctgactgtggctgcccaggaagggcctgaggaccagacctcaaacacctggactgggggcacatggctgtgaacagccaaggagtagagttatgcatgattcattttcccacagttgttaatattcacatataaagtgaaaaaactcctcatcttataaatattttatgagcttagaaattacatttctacctataaaggaagagtgaataacttgcttttgactcaaaagaaagtgatgctttggggtaggagaaagaggcaagaggctgggcacggtggttcgcgcctataatcccagcactttgggaagccaaggcaggcagattgcttgaggccagggattccggaccagactgggcaacatggcaaaaccctgtctctattaaaaaaaaaaaaaaaaattagctgagtgtggtgggacacgcctgtgatctcagctactcaggaggctgaggtgggagaattacctgagcccaggaagtcaaggctgcagtgagccatgcttacaccactgcactctggcctgggcaacagagtgagaccctgtctccaagaaaaagtccgggcgcagtggctcacacctgtcatcccagcactttgggaggctgaggtgggcagatcacttgaggtcaggagttcaagaccagcctggccaacatggcaaaaccccatctctactaaaaatacaaacattagccaggcatggtggcacgtgcctgtagtcctagctactcaggaggctgaggcaggaggatctcttgaacccaggaggtggaggttgcagtgagccaagatcgtactgttgcactccagcatgggcgacagagtgagactctctctctaaagctccctggctgctcctgatacaggtggtcaagggcctccctgtgagaaatgttttagtctctgtattagagcctggtaccatatgaggttgagcagaagtgaagaaaccctgctctcctgtgatgggtcaggcctcttgcctactatgccttaggcagttgtttgggcaagcaggtgatcccttctctattctctcctgaaagactttatctccaaataaaagttgatagaagggcaaaagtcacccctgacagggggtcacccccctccaccttccccttacacagctcgactcctgggtgagtttctaagccctgctaagccctttctacactggtctctgtggatttcctacctgttttgtctgtgtcggtgtggagtggtgaccacattccaggaaaggcctcctgccccctctgacaggcctggcagcttagagcaacgcagggccagtgctgggctgtgactgtgactatagaaagggcctgcccgtggtttggttgtgcccactgaactcagagttgctgctgtcctgtttaccctcagagctgagcactcctcccagcctgatggctcctgtggcatggcccccttccctagtcatgtgggaagggcatcccttaggctcttttcttcctacctccctctagccctgcacccttcacaaggagttacttgtaccccaggacttgcctagagaggtcagcctcattgcagagggtcttttaaaaatcaataatgtttctagtaagaactgaccctctcagtatgccaccagactcagagatttgctgacttagtggcaagtccaaattccagattgtctcatatccgtgagtgaattatagagggtaggatggttgtcatggttttttggaagcagtctattgccccaactagctccaatgggaactcagcaaccctgagtccttggcttccgcagcgttctgtggaaagagtaggatagtaggggtcaagtacacctggatttagatgtgtgctctgtgaagtgaggtgaggtattgaacttctctaaacctcagtgttctcatctgacccctaaattcatctatgaagtcctaacccccatgtgatggtatttggagatggggcctttgggagataattaggtttagataaggccatgatgtggggacctcatgctggagttagggcccttacaagaagagacaccagagcctgaccatgcagcctccctgatcttggacttccagcctccgtaactgtgagaaaataaattcctgttggttcaagccacccagtttatggtattttattatgacaggccaaggtgactgagacagatgcacctttcgagaatgaattattgtgggtgtgaattcttgtaagtgcatgtaaaacttattagctgacttttgagggttacatgcatggtaaagtgcctagtgctgtttatgataaatgcttaggagctgtgagtacctaccctctagttccagataccagacaccattcctgccgcccaaatgtgtggtccttcgggaggtcagacaataagagctaccctgcattttctggacaagctaacgaattctcctaccaaggcaagagaaataaaacagatccccaaacactgcccaagacctagtgtcatcagtctggggctggaggaaactagggctgtaggccctttgcccaagagttagacattcacctgagctgctccccatgagccgtcattctggatggcccatctgttcatgtaataagcacttacttagcacccactatgtgccatgcactcatttaagcccttgaatgcatttaaactttgtaacaactctataatgtaggtgcaatgatcatgcttactttaccatcaaggaaactgaggcccaaggaggttaaataatttgagtaaggtcacacggccagtgagtggaagcacagggttctggctccagagtcctggccaaagcaagagggaataatttggaggtcctgtgtcccttcttttaccataactagaatatttccttacagtagaatccatattgataaccaaaataattcagttccttattccctttttatatacttaaactaaaaaagaggaagtcaggtctttatttattctttctttttccaagtatccattaagtgtctaccaggtactgggcctatgcttgctgctctagcgggaggggccactggcggaaggaacagtgtatgtcttctgcagcctacaaatgactgagctttcctttcaacatagtaatttataaaaaggctgttctctttaatgaacaggaaaagatggccaaagggggcgatacttaagttggagaattcaagaacaagcacagtcctcttcctcagctcatagcccccctgcttgctccccaaagaaaaacttcggtttcatacaggaaagaaaaggcacttcctattcagtaatgggaagtgggcaagtcatgagccaagttgtgtgcaggtgctgagtggcctccctcgcaggctgggactgggcctctggagcaggtgagaccaggtggagaaggactgggggctctcccaacagtgggtggacttgtgcaggagggaggggaggcggtggcctgttcaagctgcagtcactggctcagtgttgccgggctcgtgattctttctctgattgcccagctcttttttatttatttatttatttatttttatttttatttttgagatggggtctccctctgtcacccggactggagtgcagtggtgcaatcttggctcactgcaacctctgcctcccgggttcaagcaattcttctgcctcagcctcccaagtagctgagattacaggcttgtgccatcaagtctggctaatttttgtatttttagtggagacggggtttcaccatgttgtccaggctggtctcatactcctgacctcaagtgatcagcccgccttggcttcccaaagtgctgggattacaagcacctgacaccacacccggctaattttttgtattttttgtaaagacagggtttcaccgtgttgcccaggccggtctgattgcccaactcttagatccaactgtctacccctcctctcctgggggtgcttcagaagcacctcagcatatcttaagctgaattcatgacctgtccctgaacttggccctcttcctgtgcccttatttcagacaatgtggtcaacatctacccaattatgtgcaccggcgggggacaccccgggtgattcctctccctcacacccccatccagtctctgccaagcacagtctccactccgccacatctccgccatcacccgtgtccacgctatgctgaggtcactgggaccactcccagctgcagccctgcctcttctcatcctcacactgtggccagaaatgtcaagagatgagtctggagactgagtgggaggcagggacaaaaaccactaagggccttatgtgctaagctagaggatcaattattcttgcatccagcactcactatgtgccaggcactgttctagaagctgggaatgcagccatgaagaaaacagacacatccctaggcctcaggaagctgacattttagggctgaaagacaaacattaaacacatatataacatcaggtggtcatatgtgctatggagaaaattaaagcagggtgagaaaaaagagaataggtgctattttaaatagggaggttacggaaagtatgtccaacaaggcggcatgtaagcaactgctaggaggacgtaaggagtgagccaagtgactaactgggaggacagtatgttccagaagaaagttcagcagtgcacgggttctcaggcaggggcatgctggcatattccaagaggccaggaggctggtgtggttggccttgggggtctgggagtaggaggagcaaatgaggccagagagataaggcctggagctgccaggtaggtcttgtgaaccagacgacgcagtctattcgtgggttatgaggtgggtggcagtatctgacttgcttttaaaggataactgtgttgagaatagatttagggaggcaaaagtggaagaagagaagccagcaagtgctgagagatgaactagtggggaggtagaggaggccagaggtgtcttctagagttcgtagtcacagacggatcgtgaccccggggccgttctgttgggaggcggtgtgggaaggagggcacagactccaaggaggagcccctgggagagcctgaagacccagaaaacaggcgggattggagatggctccgctcactgccgtgttggcccctttgctttacttcagacacaggtcccagatcagctggacttttccagacctcctggctgcgaggattgagttgacagtgtcctctctgctctggccaggagcaggcccttgcatttggggcatttccgtgcaggaggagtcgggggaaatcaagtggtaaaggtgcctctccagggcctttgtagggaccctgcgtgatcgcagccggctcctggccctgctgttgctgtagttgcaacgtagttggttctactcctgcagtgggtctttgactcccttatccttacttcatttcagaatacaagtcacttgatgattgtgaggagctggtgatcaatgctacagcgacaatcaacaatttatcttactaccaagtgaagaattccataattcaagacaaaaagctatatattgctgaatgtaaggttcagagttggatttggataaatgagtgctcatttgaagtttcgattttattaactaaacacagagcaggagacattactatcttctgccttctggtacagaaatgtcttagagcctgatgattctaagaaattagaatatggggaaactagaaatgggaaaaattagtttcttagttcttgctaaagtcccttacagtttgtaatttattatcatttgaaaatcatcagtattaagtatgatgttgatttccattaacctttaagttaaaacttaaattcactgatttaatttctctggtcgccaaatccagtgctcttaaagcttcttgtcagtaacaacatggatggaatcctggaggctgtgcgtgttttcggaaatctctcccaggaccatgatgtctgcgatttcattgtgcagaacaatggtgagttaataacactagaattcataaacattcactttttgccaataatcagctgagtggttttgcagcttgagtcattacagtgttatacttgtttccgttttgagatttgtaaagcttcgtgtttaaggctcctggctcaggatgccaagatggacctaggcagtgttcccctctgccttgtgaatggccttctgtgctccaagatggggtgtgtgtatgtctaatggaaacagtgaatcttgagtaatcacttctgtctgggggcatattcttaagaagacattctcttttatgtactagaatgtctattacattttgcttataatagcaaaaagtagaaacaacctaaatgttcctcaacagagaagaggacaaattcattatggtatattcatgcaataaaatgttctctagcatttaaaagcaataggaggatatatgcagaggaatgccttgaatataagttttaaaacatacaaaactaccttttgcttctgcattggtattgcttctgcacaggtattcacgtagtgatgctatacagtataaatagtaattggaaatagtaaactccaatttaagacagagttcaggctgggtacagtggttcaagcctgtaataccagcactttgggaggctaaggtgggaggattgcttgagggcacgagtttgagatcaacctgggtaacatagtgagaacctgtctctacaaaaatttaaaattagccagacgtggtggtggcacaagtcccagctacttgggaggctgaggcaggaggatcacttgagcccagaagtttgaggctacagtgagccatgattgtgccactgccctctaggctgggagacagagcgacactctatctctaaaaaataaaaaaaatttaaaaattaaaaaaggacagcattcacctttggaaagaaagggatgtccaaagattataattggacctataatgttatttattatcaaataagaattgtttatatttattatgtacaacatattgtttggaatgtaatgttttatttcttaaactgagtggcaagtacccacatgtttataccctttgtatgtctcaaatatttttgtatgtctcaaatattagtatactttgactctttgtatgtctcaaatatttcatgtaacaataattttaaaaacataactctccatgttcgtaatggaaaatttcaataatacagatacaaaaagcagcagcagcaaaccatgccccatcctctcactacctgcagataactgcacattttgctgggcactatttagcctcttaagagcacatatgtacgtgatgttgcctctgtcaagcttactgcccaacccagttaacagggccggggctagaacagggcagcccctctcaggtgcacgtactgtgggaggaggcagaatgcacactttactcactcttccccaaccctttgctcagcgtctgctgagggatgagaaaacaggacaaacagttcccagttccatttcctaggagtaagggaaaatgattctcctgaggcaggagcctgtcctgccttgagatgtccctacactggaaggcctgccttgccccaggttggtttttagcagtctgagtcttacacatggccctgggagacttcaggaatgatcccaccaggagccaactcccctctccaggactgtgtatttaaagacagacagttgctgctggaggtttaggaacacccttgagaataactggaagttagatgagtgtcacctgtgctccctcctttccaccagctgggactctttcactgccgtggagaagcagctgctgcctgggtcaggttttgcagtatctgtcgattgggggagccaactctgggagtggtgggtattggggaacccactgctgtgtgatggataaagccttaggaagaatgagttaagtcccttaacaggggttctgggtttgcaagccactccccgtttccccataccatctgtaaaacaagagacagctgggaatcctgaacttttactggtctgcatttgctctcttccctcgtagtccacaggttcatgatggcgctgctggatgctcagcatcaggatatctgcttttctgcctgtggtgttctcctcaatctcactgtggataaagacaagcgtgtcatcttgaaagaaggaggtggcattaaaaagtaagtttcagggcgtagagtactgactctctcaggatttgaaggacatcattttcttgggagctttggccctttcatcattcctgtggggcaaaggtatttcaacattgggaagcccctaagctgaggctaaagagggggtttagattccactggatacttaaaatagtgcagaagtaggccaggtgtggtggctcgcacctgtaatcccagcattttgggaggccgaggtgggcagatcacttgaggccaggagttcgagagcagcctggccaacatggtgaaaccctgtctctactaaaaagacaaaaattagccaggcgttgtggcacacgcctgtaatcccagctattcaggaggctgaggcaggagaatcgcttgaatccgggatacagaggttgcagtgagtggaggttgcggtgagccgagatcgcgcgactgcacttcagcctgggcaacagagtgagactctgtctcaaaaaaaaaaaggtgtagaagtagattattgctactttataaccacttaaatttatagataaggaattattttaagtgatcactggattatacttacatatcacagaaggataatcattatgctaacaatattaaaattaaagacagattctgacctaataacttctcaatttgaattttattaactcaggttagtggactgtttaagagatttgggtcctactgattggcagctggcctgcttggtttgtaaaactttatggaacttcagtgaaaacatcactaatgcttcgtcatgttttggaaatgaagacaccaacacactcttactcttgctctcatcatttttaggtaagactcttgactatgatgagtctgtgagttttatcagagtgtgagatagtttttttctgtgacctgttcggataaatattagtatgcatttaggtgactatatttctataagcaacaagagtatgttaaagattactataatttggaactgaaaaggctgaatgctatttacagtggggacagaaggactttcaactcattagatacattcatgatttcttctatggctttttttttttttttttgcattttctctagagtgcataaatataagacctcagcgtaaatgtacttctgttgttcaaaagcaaatagacactattgtaattgagaaaatacggctaaaatctactcaagtcatgcttttaaatgaagctatacattttaattagctacgttaattatcatgtgggtgagggcctgtgagactatttggcattacaatggagtttatatccttgaaaggtaggaaatcactgatacaaatcaaaggaaagaagattgtttctttcttttcttgggacagggtcttgctctgtcatccaggatggaatacagtggtgcgatcactgctcactgcagctctaaactcctgggctcaagtgatcctcctgcctctgtctctcaagtagctgggactacagacacgcaccaccatgcccagataattaaaaaaaaatttttttttttgtagcgatgaggtcttgctatgttacccaggctggtgtcaacctcctgggctcaagcgatcctcccacctcagcctcccaaagtgctgggattactggtgtgaaccaccttgcctggccaggatcattttttacatttaaaaaatttttataattttaggataatttttttcttcctgggttaattctaaaaacaatgatttgggtcagtaagtgagtgtttttaataatcctttttcccaaatagaggagatgtacccatcactgcccagccaccatactagatccaggaggccatgtggaaaggctcaaggtcacttggaagccataggtgctgagtttttaaattttgagctcaacttctctgcaacctgagaaagcttaacagacacctttcctttacactccttcactaaccagagcagaggctcccaatcctggctgcagagcagactcacccgtggaacttttaaaaacacagattatcagccgttccgaaatgatattttatcatctccaagatgaggataattaatgtccagattgcagggtgataaatgagcagatgtgtacaaagagcctaacacagtgcctgctgcatagcaagtcctcagaaggtggctgacgtgctctggaaactctttaagtgttgtaacaccgtgctactaaacagaaactggaactcaggagttgtttgaaataattgggtttgctaggttgatgtgaaatttggtttttccaggtaaatataattttgtacatgtgttttaaaacacaataaggaaaaaaaagtgagcatttttttttaatcattgaggttcacagtcggctccatgagcattaaactgactcaggttgcagggagcagaagtgcatgttcaggttgccttaattcagttctcgatggtggtagagcattgaaatcagctgtggagttaaaacccaaaaaaactaaaaacaccttcctggccccagccctaggaattctgattcagaagctctgggatgaggctgagaatctgtgttcaaagttccacaggtgagtctattagctaagattgagagcccctgctctcgttagcaaaggagcttaagggaagagtgtacagagaagaaagaagccaggaaacaagatactgctcaaagcctcccagagaggcaggcaggagccagagtcccaagtgacccctcagccgtgggcgtcatgagctccgccccctgggctctgccattctggagacccagctgtgttgtgtctgctgttagggaaagaattctctccccacttactctctctaggctccttctagatcatggcttcagctacctccaggcttccacttgctgccctccctgtgtctgtctgttgccagggcactttcctatgtcacccactccaggagaagatatgattggctcagtgagtcactgtcctatggcccagggctttcccgcataggcagcagctaccgggtgacaggctatctgtggtttcctttgttacccaagcctggggcaatcagccataaataacaaggatggtggggctgcggggccggggccgtgtggcataaagatggatcagaaggaggtgtgggcatggctggcttctcagcaggggcagtgtacctggaaggcacttcattttagtgggccctgctgcctgttacagtcaccccttggtatctggggggattggtttcagggcctgcctcagataccaacacagatgcccaagtgcctgatataaaatgacatagaattggcatttcacctacacacatcttcctgcacacgttaaaccatctctagactacttataatacctacagtgtgaacgctatgtaaatggttgtcgtgctgtgatttttatttgtattctttttattgttgttgtttcaaatattctgtctgtggttggttgaacctgtggatacgtggcccgtggatgcgaagggctgactgcgctccattcccaacttttccatagcctaactgggcttctgattgtgcttctcccgcctctgtgcctttgcacatgttctgtttcatttcctgcctgcccatcccaatctgcctagccaggtgcaggcccttcccacgtagcttctcaagcccacagtcgtaggctagtcataggaaatctatacttcttatatagcaatcagtcatgaattgtgtaacttgtcctgtaattatcctgtattattattttgtgagttttatcttatttcccctttgcaactgaaccaccttaggaaaaggatattgcctcatacaaagaaggtacttgatagctgcatgtggattggctaacaatggtggtacctttgtttcaatagtgctatatccttttaaaagcatgtttattctatttttgaaagatctgaggccatcagctaggtgacagatacggaaagtaggttttaggacagttaagtggcttgcctgaagtcatactgtagcaaaggcaggaattcccatccgaaaacaaacaactagccttgtgttttccagccgctccgttacctagaacacccttactccactgcaccttgtgcagggggactgtggcatggataacagcaaataaacacagctcactcaggaagccaagccactgcaatgcatcccaggtttctcacgtgagctcctcttcacgaaccatggggactgtgccttgtgggctgggtggtgggctgtgctgcctcctggcttttctcttggcaatgagcactcagaccctgacttctgaccgggtcgtggctgggtctgggcagtgggactgctgcgagtgaaatgggcatgtgggtgagagtatacttgcatttcaattcttttacaaagatagctaaaacaaacaaacaaacaaaaacaggccattttggaaacaggatgagctgttgaattaccaaggcctgtgttgaagtatgaacactgtttttgcaaatactggtatggcaatttctatagtaatgtaagttacctaactttttcttgctgagtgactagaaaaaaaggagaagtaatataccctcaacatcgttggaatgttgacagtctttctggaaagtggctttaaaagaacgtggtctgaaacttcccattatactgcagtcatgtcttatgagctcataagcagcgtgttgatgctgaagttcttagtggtgtgctgagcactccagactaccatgagcccctctgtggggagctggcacctgatgaccatgtgtgtagtttattgttgcaaatgggaagtacactaggctgttgtatgttcatcctaagttttgtggcagtgggcacttaggttttgtgacaagggtagagcggggccccacgttcaagttggaggatcacatcaacctatgttgaagagctttcaggtgcttctagaacattcgacaactttgccttataagagaatggtcagggcgatgataaatcccttaaacagccatctgctgctgaacagctagctaggaaatagtgtagtgagtaaaggaagcttttatagatgctgcaggacacaaacttctaatgatgattgtgttgtaatgaccattgatacatatttatattttagggtcttttaattctttctaatactttgccccaaattttagtatttggaagcatgctgtgcctaaagaaagcttaagaatgattggttacctaaataagcacttttcacactgcaggtcaggaaaacaatttagttggttgtgaccagcatctttaaaaaatgaagtagcaaagaaagaaaatatcagaatgtattatatttagtaaagacaagtattataatgtgaaacatttgtttattcatatataagtaggtatatgtatacagagtcatgatgcaaaatactgtgaagcacagtttctaacttatgatgattcaaatcttaaaaagaattaatcaaaggctgagtgcaatggctcatgcctgtaatcccagcactttgggaggacgaggtgggagaatcacttgaggctaggagtttgagaccagcttgggcaacgtagtgagacccatctctactaaaagtgaaaaaattagctgggtgtgtgtgttttgtagtcttagccactcaggaaactgaggtgggagaatcacttgagcccaggaattcaaggctacagtgagctatgattgcaccactgcattccagcctgggtgacagaatgagactctgtctcttaaaaaaaaaaattgaatcatagatctaaatttttactcaatcagcctctgctactctttgcagtacaagttccaaaatttaataccccatgtgatatggcacttttaatgtatgttgctgtgtttactttgaaactttagacctcatttctcttacctgtagctgtttggctattcttgttatcttgtctaacccaatttagaattaatatggtttgagggtggattaactataggctgggcctcaagacaagtaacatggtcttgacattagattttaaaaagccactcacccaacagagattttgctaaaaccactaaatctaaccaaagccctaggagaaagaagggactatgacatgcccaggccacactgctcagccgccagcagcttgggaaagaagggcttctgcaacagaatgcattttctttctttcttttctttttcttctcttttctttttttttttttttttttttgagacagagtctctcactgtcgcccaggctggagtgcaatggcacgatcatggctcactgcactctctgcctcctgggttcaagtgattctcctgcctcagcctcccaagtagctgggactacaggagcccgccacatgcctggctaattttttgtatttttagtagagatggggtttcatcatgttggccaggttgatcttgaactcctgacctcaggtgatccacctgcctcagcctcccaaagtgatgggattataggcgtgagccaccgtacccagaatttattttctatacaacagaattcattttctatacaacagaattttatttttatacagcagaattcacttttcaacaaaatttaatgttcagaaaatctggaaaacagtgagcaggaagatggcctagaaatgtgaaatcactggctgggcgctgtggctcacacctgtaatcccagcactttgggaggccaaggtgggtggatcacctgaggtcaggagttcgagaccagcctgggcaacatggcaaaaccccatctctactaaaaacacaaaaaattagcctggtctggtggcacatgcctgtagtcccagctacttgggaggctgaggcacaaggatcacttgaatctgggacatgaaggttgcagtgagccgagatcacaccattgcactccagagtagactctgtctcgaaaaaacggaatgaaatctgaatcactgagactacctgactctttttgtctggaagtagccaaacaggaagagctctgaacgcaccacatatcacctgcattctcctcccctcagggcccagttatctcatgggtggggagatccaggtttgcttacagggtctccatggagctccttgccgaagtgtttgtgtctgcctggagcttatctcagaactgcatagttgaccacttggttgtgatgagaggaaggtacaaactgggattccagactcccttatcttattttgggtggtgacactaacacccatagtgccaaagtacacagtgaatgtacacaaatattcagtgtagaaaatctgatatcaacagagtcatgaagcattttgtaataggattttcattggcccttaaaaaaaaagtatcggcagctgggtgcagtggctcacgcctgtaacctagcactttgggaggccaaggcaggcggatcacttgaggtcaggagttggagaccagccgggccaacatggtaaaactctgtctctactaaaaagaaaaaattagctgggtgtggtggcacatgcctgtaatcccagctgctcaggaggctgaggcagaggaattgcttgaacccgggaggcagaggttgcagtgagccgagactgcgccactgcactccagcctgggtgacacagcgagagtccatctcaaaaaaaaaaaaaaaaaagtgttggcaatttaagtaacaacatctgtggttgttttaggatttagtggttaccattttagaagttggcctcatgtcacaaatgtaggaagtggcagagctaatctgattggcaggtcagtgcacttttctgaagtctgtcacacagagtgtgaggctcaacatcaacatgtaaaattgctgtggcaatcagcacagaaacctcagtggtcatttatcttcctacttggattgaatatatttatggtcatttatcttcctacctggattgaatatatttatggtgttcccagaattccttggattaagaattgaagttgtacttttgcattttattcttacaagttcttttctgcattatccatgggctcacttgggattctaatactccttgggattcccaaggtctctcagttttcagttatggagagagtttgggggtggaaagttgtctttccaaagtactacttccctgctgctttgaagccagcaaagttctgattttcagtaaagtttaaagtgtcaaatttaactgagctattttcctaaaagatttcctgattccttttatacctaacctttgaagtaattaatttttctatgtacacataaggaagtaacatattaatacgttgtttattctgagaaattgtgatctgacttttagatacaaacttacatataaaaaactaaggaattagttgaaataagggttcagttcaattttggattttttattttttgagacagggtctctctgtgtctcttaggctggatggcggtggcatgatcgtgccccactgcagcctcaatgtcccgtgctcaagtgattctcctgacctcagcctctcgagtaactgggaccacaggcacatgcccccatgcccagataatcttctgatttttttttttttttctgagctgtcactgtgttgcccaagctaatcttgaactctggggctcaagcaattctcctacctcaggctcccaatgtgttggcattacaggtatgagccaccacaactggccagactttttttgaaaaaaatattgcccatttaaattaagataccaaaatagactaattgtaaactaatgggcttggcgaggtagcgcacacctgcaatcccagcactttggcacttggggaggccaaggtgggaggattgcttgaggtcaggagttggagaccagtctgggtaatacatggagaccctgcctctccaaataaaataaaataaaatgatgtattcataaagaacagaagagagtaaagaacttctctgaaatcctgtcttgtgttacgttggtattaaaggacgacccagggtgagtttaactcatatcatcaaaattaaactatattcaataggattacatttctaaataatgctgtaatttaaatttttctaatacagatgaagaactagcactggatggcagttttgatccagacctaaaaaactatcacaaactccattgggaaacagaattcaaacctgtggcacagcagcttctaaaccgaattcagagacatcacaccttcctggaacccctgcccattccctctttctaacatgatgcagattaacagtagaaacgagaactcacgtctccctcattcttaagaactggtaacaaacgtgaacatttttttcagcattaacaaatgtggaaagtttttcaagaactggttttagtgagtagctgaagtattttttaaaattaagcatttcttcttgttaggtattatggaaaaatgaatatacacattatatttcctgttgagagaaatgtaagatgaaaatatgtgcattttcaagtaaatgactttttcttctattctctattaaacaatttagttctagtcttaaaatcttgatttaacaattttggaattgaagtgttcataagttaaatgaactgtgcaatgaaggctgttagattatatagaaagaagggtaggcaacatgagtggaacacgttacaacataggatctgtactaattcttactatgtcaaataataaatgctctcattaggtaccagtatttttttggtctttatattaagagaaggagtaagcagaaaaacttaaagaaaactgctttgggccatctgttctttattaaataagtaaaatagataaaatgagagtatattttcatttgaaataaaatgactggactaagacagtccttctaattgtaactctctgtgtttgacaggtgaggtaatgtattagaaagaatgcaggcttaggtgaatggtatacctgaatctgaatccatgctctcccctgctagctttgtgggcctggagcaagtaacttaatttcttgagctgcaactgcaaaatgggaatcatatcaattttactgtagtgtagtttggaacaaaccattaaatgggcaaatggcccagtccagtgtatcatgtggagtgggtgttcaagaacattatgatggcaagcactttcttagcttgccatcctttgtaggatgagtttggcctttgaataaatgattaaagagcaaaagattgagattactattattatcctatactagccaaatgaagatgagttggaaataaaaataaatttgctggctcacacctgtaattcagtactttagaaggcggagtggggaggatcccatgaggctaggatttcaagaccagcctgggcaacaaagtgagacctcatctcaacaacaaaaagcaaatttactactctgcttggagaaaagcttttataaacagctcatttctcaccctacaaaacaccaagactcatgggatgagagcaggcatcccagactgaatggggttcttgaagcctattagaataaaccagctgggcatggtggctcacacctgtaatcccaacactctgggaggccgaggcgggcatatcacctgaggtcgtgagttcgagaccagtttggccaacatggtgaaaccccatctctactaaaaatacaaaaattagtctggcatggttgcacatgcctgtaatctcagctactcgcgaggctgaggcacgagaatctttctctctctctttttttttttcttaattattatactttaagttctggggtacatatgcagaatgtggaggtttgttacatgggtatacatgtgccgtagtggtttgttgcacccataacccatcatctacattaggtatttcttctaatgctgtccctcccctagcccccaaccccctgatggaccccagtgtgtgatgttcccctctgtgtgtccatgtgttcttattgttcagctcccacttatgaatgagaacatgtggtgtttggttttctgttcctgtgttagtttgttgagaatgatggtttccaaattcatccatgtccctgcaaaggacatgaactcatcctgatttatggcttcatagtattccatggtatatatgtgccaaattttctttatccagtctatcattgatgggcatttgggttgattccaagtctttgctattgtgaacagtgctgcaataaacatacatgtgcatgtgtctttatagtagaatgatttataatcctttgggtatatacccagtaatgggattgctgggtcaaatggtatttctagttctagatccttgaggaattgccacactgtcttcccaatggttgaactaatttacactcccaccaacagtgtaaaagcattcctatttctccac

SEQ ID NO: 44 - DNA, 394555 bp, Homo sapiens
  source 1..394555: mol_type = genomic DNA
gggctgtggctggggccacaaggacctgggtccacacggctgcccatcactcaactgtggtaatgtgcctaacggtgtcacgcgccctgccaaagactaaacgcaggtaaaggaaacatgggcccaagcacagtaagccctcaaaggacctgaggtggagagacaggggtaagcctccagctcctggcctcaccttggaggctgggctgtcgggggctggtggataaagggaggggctgctttcaacggagtcagggggtggtgaagggggacgtcagttccaaacagatactgttccaggcttaaaaccacatacaaccgatgtgaaagaacattttgtcatcagataaaaagctggcttcgcctccccctggattatccaggtcactatgttagcttttcccagaaatatcccgatagaaagccgctggcttccatgcccaagcccattttccccggtagcacggtgtttaaagggtttgtcttggactatgaacaggcacattatgtctaccaacttttttttttttgacagagtcttgctctgtcatccagaatggagtgcagtggcgtgatcttcgctcactgcaacctctgcctcccgggttcaagcaattctcccacctcaacctcccgagtagctgggaatcacaggtgtgagccaccacacccaactaattttttgtatttttagtagagacagggtttcaccatgttggccaggctggtcccaaactcctgacctcaggtgatccacccgcctcaggctcccaaagtgctgggaacacaggcgtgagccaccgtgcccagccatgtctaccaacttccatgaaagatgacagaaggaatgctgagaccagcacttcgggatcctccctgccgcagtctcggcctgctttccgccactgtggttctccataaaggagagtgtcttccaggcagtgggaattgcaaggatggccttggagccagaaccacctgtgtgcactcccaccttagtgatttacaagccacatgtctcctgtgtgtgaatgaatgcctctgagcctcatttgtcagctctgtaaagctgaggggctcacgcttctcctgggcttgctaaggattcaggggttaatgcaggcagagtgcctgggccaggtctgctccactgcgtggcagcactagttgtgacagctacgtgacagaagtgctgtccacacgacaacatgtaagcctcgtgcccctccaccctcttcttgccctgttcacatcaacgggcgcacaagtggacgtggtggaggtggaatgcggaaggtggaggacagaaaggggccgaaggcccacagtttgtaagccggggcaagtgccacatatttttatgtatccagagtgatctctgacaagggttggagtgacctgtgtcatctatatacccgaaagcacagccagaggaagccttgattctctcctgtcagcagggtagtgaacaactcacaaaatggcctgatttcagaagtttgggatcaactgagaatatgtttatttaaaagcaattttaaatattaaaaaaagtagaaattaacacatacagtactgaaaaactgtcacattaaacacatgtgaaatgacaagtgtactgatgtttgatggtaacatccagatgagaattcggcatttaactagtggcactacaggattcctatacaacatgttgaagttctaggcaataaaaaaataaatagcaattgctgttcaacagtaaaataagacacacactatttgcagaacataactttcccctctgggggaaaaagaactaatttgctatttttttttcataaggttccatatcttcaaaatactatataatgtacaaaattgcagatagtggcttactgagtttaagatcaagatcagacttaaactcaacaagatcaccaaaggtatttctactgagttttcctatgtcccacagtaagctgggttagagagaactcaaattcctgatggaaaacaaaaccgaacaaaaaaactagaaaaaaaaggtgttaaaaatgctgtgtaagttgctgcaaaaggggaaaaagaatagacactaactccatgtaattttagacatgcagcttttgtgttttttttttgtttttgttttttttttttttttgaaaaaaaccagtttattttgagatcagtgaaaagagtctaggccacagaaaagaacagctctttaatgcaagttaaaatgtgtaaatgaatgaccgggacactgagcaacctcagatgcagacttccatccggacactggtgtggcttcagtaccgaggctgctaaagctgccagtcacaacccagcatgtcaactggttcctcatgctctgtttggtgtggaaattcacatgtgccctgacactgaggaagcaattgcttaaaatcactttccaataacagctgataaaatattttgcaggtttgtcatgcaaggtttatttattaggtggctattcaaagtttgtatagcaaccacttaagcagaactaaattaatattcactgagcactgtaacgatggaagagggcttttcctaagggttgggttgggagttgtgcttctgtgaaattaacatctctcactcattgccaagattctctgcttaaaaatattagttttctgtgctgttgccaaaatagcaatttaagcaaatgtagtgccagaatgacacatgagcctcggactcagggaacagttccactgactgtggagtacaactattgcattcttttccaaaattcagactgatgtaaaagactgaaatacaatgttcttaaggatctgataaacatggctgggatgaaaagaaaactgagagggaagagtgcttttcacagtgcaattcatagcagcgttcaaaaacttggttatgaattgacttgaaggtggacagagcttaagactggaaaaattatctataattggggtttaacaaagagcatgggaaaagaaacacttggtttcagcacctggattctacatacagtagggaaactgtgtgaagggttgacttttaaattcatcttgaataatcttttaaaagtttaaatttgtccaagaacaaaactaagaaaataataaaaaatggatgcaatggatgcttcaacacatctgagagatgtgcattcataacacaatatgtcaatccatactcttgagaaagccagtgattagaaacaaatattgttgcaaccttataatttctgctttaatggcaatcaagtttaaaaaatgtacaattccacttatccatactattcctttataaaaggcagatttcaggtaagcttctaaatgcatgcgtaatgtagaggctaatattttctggcagtccttggttcctgaaatttgaacttcatatgtgttttaaacttttgtcaaaatagtcatgaaagatatgttatttttgcataatgaggtaatatatcaggggcgggcactcataagacagtataaatccacttgtctaaacttgcatgaggctgtgtgcattgtaaaatgccataaagagttttgggtcagtgaatattttgctgaaggaataacacttacatttaactgagcacttttctgtaataaataccaaagtaggtttttgtagctgtaaactgtgtacacagataactacaggctggtctgtcatggagctaaaagtttcacctggaaaacagaacccacctctttgctaatgttgcattttcagtaacacaattgagaatactgcattgttaggaacagagtcaattctatgcctttcaacggttgctggagaccacttctatttgcaaagccagcagttcctatactcctatttttgtttgtttgcttgtagaacagcatagagagatgtaagtgctagatgccaaggatggctttggcaaaccagtaaggcgcgccgggtccgaggctaccctcatactggtgaaggcagaaaaccacaggatatttacaacacacattatatccccctcctgaggtggcccttccatgagtttcttactctgtaacagcagctatatacacactgtgcccagggttacatgaaggcagcagtcttgcatgaaggatgtggacaatcttaaggttctgcgttttgctagtcagacaggatatgaacaaaggacactggaaagacccccttcctttcaggctgtccttcgatgtggccaatctgcagggagaaaagagagtggtcaggatggaggcagcaggcagtggccccacgacaaacccagtgggtaagagcccagcctagtctgcccacagacctggcggtggaatcccaggcttacccttcttcccaccctttagtgaactacagagagcttaacggtcataaactacataaggaaagagcaaacgacagaacttccaatatgctcagcattctacatggatcttgctgtacccacacagcaaccccctgaggtggatatttcttatacagtttacaatcttcattttacagatgaagggacagtggcccagagaggtgacatgctctcccacaggcgtggggctctagagtccttgctctgaaccagggcgcctggctgcctttacagctgggtgacctcacacaaaccttgctaagccttttctctgttaagtggggctaaagaaaatcccttctctccaggcttgtgtgatacatttaaaaaagaaaaaaaaaaaaaaaagcaaatgaaaaggctgctatggcacctggccaatcccagtactattacctattcctagttgggaaggaaggggtttctttgcccacagcccaggtaggatgcatacagaccattaagctgtgtcagctgcctggcaagacccactgcggggtaccatactcaaatcaaagctaatcttgttctgtctcttctctttgtgagtaaagtgttgttctagccagtaaaaaaaaaaaaaaaaggctgctatgtactatcacttgttttctggttaccgtggaggaagaatactgtgaaagtttgagactgatggtggcgaatggcaattttattgtctgctgcattggcctgtaagccagttacctgtaaaaattttctaattacctcaattagattagtattgattgcactaaagagaatcatgtaatgggccttcaatagaaaaaacaaaatcgtgcatattggcttccaatgccaaatcgatagagaggaaggtggttttaagagtggaacagagtcaaccaggcctgcccagctctcctgaaggcttgcccacccaccgcgtgtggtcttagttggcatcatgcatgtgtgaggtctttgtgaatttcacatcacagttagcatgtgtgtgtggcaccatctttacatctggcgaggcacgtaatggtggcacacacaatgtcccctaggaatgatgctagggacaccaatgacagcttcccattccccgcaggtatctctgctgtagtcatcagttgcttagcaaagaacatgatcactgcttgattataataatattaacagattacaaagtgagttcctcaacatccttgtgagaaacgattaatcatgtcctatttttcagaggaaagtgaggcttacagaagggacatgctttatccaaggcccatagagctagtaactgattcacgtgggggggcttcagagcccacctcctcgtcatgagatgaagtggactctctgacaggcttcatgccaggggctggccccactctgctgacagaggctggaggtacccctgggcctccccaggctgatcccttcagtccagtttctcaaccatggtgctactggcatccttgcttgtgggggctccctgagtactggaggatgtttagtggcatccctggccactaaacttccatctactagttgttggtagcaacccccttcctaggtcctgacaatcaatatttccagatattgtaaatgtccctggagggcaaaattgccccagttgagtccaaacaaaatccctacagctgtgattaagaatctgaggtcactgtctaggcctgaaggaagaaaagtcaaaggtgaatgtgtgcccatgcctatgtgtgtgtgcacacatgtatatacatatgtatttctgggtattcttaggtactgctggctcaactgcgagcctcaggtcccttcctggcagacagaactgagtccctcttggcaggacggggctcaggctgccaaggaaggggaattttcaccctgatgtcaggaaatgatcaacaaggagagcagaagaggtggcttattcactgtaccttggcctggcagttcccatcgggagacttactccctggcaacgtgaaaaccaatagatgtgtggactgccctcgcaggtcactcacagcctgggtacctagcagggcctatgaggatgctgatgtctttccctcctgatgcctgagctgcaggttttaatgtaaaaggagttttcatagatattttcatttaatcttttcctaaaattacgtggagaaggtgtcttggcctatttgacaaagaaagaactgcagactggattaagaattgagtctgaggacttgtcaactgctcagcctgagcaggaacttgggcattctgattcccagcctggggacagtgtggaatggtgagcaaagcacataggctctggggtcagggccgatctggaatcttgacttagcctgcttactggctgagggaccacaggcaacatgctcaactttcttccgctttagtatttatatgaaaaatcagaaaatgcctacaactcacaaggttacatgataccatgggtaaagtacatacaaatgttaattctcttgacctgtcttcaaagccccatggctgtttttcttttttttcagatggagtctcgctctgttgcccaggctggagtgtagtggtgtgatctcatctcactgcaacctgtgcctcccgggttcaagcgattctcctgccttggcctcccgagtagctgggactacaggtgcgtgccaccatgcccagttaattttttgtatttttagtagacacggggtttcaccatgctggccaggctggtctcgaactcccgacctcgagatccatccgcctcagcctcccaaagtgctgggattacaggcgtgagccactgtgcccggccagctccacggctgtttttctagcatgtaatagtgtgtgacatagaaaagacaccaaatgcaatggctgttgggtgagtgatgcagctgacagggtccttgtgctcaagagccctcttttactgcactgtctgtaggctccaatgtggtgcctgcccaggcatgctgtatgaatgtacggatgaagtggatggatattcgtacgtacccaccactcctggtcctcttcccctgtgacgataatcacttctccctcgatgaatgtgagctcgtcatcgttgtctgcctggcagtcataaatggtcttcactcgcctcactttatttttccccttaaagaaagaaactgggttttaattgaaagaatggactgaatggaaaaaaagagcagcggttctttgtaaaatggttgaccttggccagtaacttaacctcgctgagccttgatttcctcacccttgaagggcgggaagaagagtgtctgtcaggcacccagcatactgtgtactcttaactacaggcccttcctctccccccatcatcagggtggccctgcattggtgattgggcatcatcaagttattttcaccagaaagcaaacactatgggtagggatcaaaattgagcttcaccaaaaaccatcaagcactctgtacgcacccccaacccacatcagcttgcagaatgacagcagagtctaaaaatgtttttaggaaacatgatgtaaagcaaaatctgcagcttctgcataatgaatgtgcagcataaacaaatttgtcagtcccctcatgcaaaacagcaagtcagtacatgctggttaaacacagcaggatcggcctggggctcggagaagtctatgcagttcctaaaacagttttaatttttgattagttttgatttgagcatttatttgttgaacttccagttctttgcaaatagaaaagtgaaaatagaggtatcaccttctaaatgatgggtttttgttttgcacctggctaattggcaattttaaaaaaagcaagctgtctctttaaatgttttgggtggagtgcctcttcctctctgtcccctggtttctcctttaatcaccctgatagttccagctgctttccgagctcccttctgggccgtgcgggtgggttggagaagcctggcagaactgtggcagtgactgcgtgagcaactgagaggcctgtagtgtgttaatttataacacagagattaaatgacataataaaactatatagtgtgtagcatgaaatgaaaattttgcatcagtggtgcttgggagtcatgggagagttcccttttgaatagcagaagtatccaccatcagacacggcagcctccaacctacaggaagatgggttttatttttcttaatttaagtattgatatgacacacttttactgcaacatttaaattttttttttttttgagacggggtttcactctgttgcccaggctagagtgcagtggcatgattacgctcactgcagcctcgatctccagggctcaagcaatcttcccgccttagcctcccaagtagctgggatcgcaggcatgtaccaccatgcccagctaattaatttttattttttatagagacggtttctctgtatgttgcccaggctggtcatgaatcctgggctcaagggaacctcgcactttggcctcccaaagtgctgaaattacagatgtgagccactgcacccagccccattttaatttttttgagacagggtcttgctctgttacccaggctggagtgtagtggtgtgatcacagcagccctgaactcctggcctcaagcgatccactcgcctcttcccaaagtgctgggtactgtaacattttataacagaatgtgaggcaggtagagctgccatgtgcaatgggagaacttctggatatagagtaggaaacatttcatgaaaatgacagaatatgagatttctacaaaattctatgctattctattatatcgagagctttatctccaattcctttaggaagatgcagcgagaaagtctgacttagcaactcagggagccaggtgcagtggctcacgcctgtaatcccagcactttgagaggccaagatgggaggagtgcttgagcccatgagttcaagaccagcctgggcaacatggcaaaaccccatctctaccaaaaatattaaaaaaaagccaggcgtagtgatatgtaccttggtcccagctactcaggaggctgaggtaagaggatcacctgagcctaggagactgaggctgcagtgagctgtgatcgcaccactgcactccagcctgggcgacagagcgagcccttctcaaaaaaaaaaaaaaaaaaaaaaaaaaaaaatagagagagagagaaaatacccagaaccccgagagggaaattggtttctcgtgaccctcaggaaaggaaaagtttcatcctcaaggttcctaggtaatagtgactacttgctcagtggtctaggtgccagccaagtgctgctcatttgtcactgtatttaatcatctgtgagctcaaatattgtattagctcctttttgtatgtgaagaaagtaagactcagagaaagtaacttgccaaggttgtgcagttatgtcaggcactgaagccaggtcttgaagcctgtctgctggagcctaaagcctgggtttgtaacccacaggctctaatccaccatcatgcttgaaccagagcacataagggtcaggtgagcaagctctcactttttcttgtgtaagttggagcacctgccctcccaccaacttgcaaagtgcggaatagggttcctaagggcctgaacattgtcccacccaccgtattgatttttctgggcagtggtacgggcgtctctggcagagtaggcgtgaggtcgttggagtcttcagatgcttgcttttggatggcgtctctggactgcacatttggggatagatccaatgggtgtgacttcagtgtgacctcagagggttgctgagccttgggtgagacatctccagtctgggattttgctagcaggtctcccagctgtggtttggggggcaggtccttcatctgtggtttgggaggtaagtctgagagttggggtttgggtggcaggtcccccagctgtggtttggggggcagttctcctggcttaggcggcaaatctccaatttggggcttgggggccagttctgtgggctttgggggcaggtctccaggtggtggcttttgtggcaactctgccaactgtgatgatttctgaaagatttcgggcgggatggtggctttgtctagggagagatgatctgttttccttagtgccactgtggaagcaatcaaaaacaaggaggtcattggtgggaagggctgctttcctgtcagtcacctaaaagaggcaccatcatcatgaagggaactgacctatagtgagcacttgaaatggatgaactcaggggccaggcccacccaggcagttttacaaagacaaagtttgaaagcctggaaagtgttacaattcatgattttatgcttcaattatataagaacaggatgtctacattcatccagaattaaaaaaaataaatagaaacagattgcagagaatcggaaagtacagagttcttaagcctaacacctaaatgtagccatttaaaattcttttatatagttccttttaattttcctatatattttctatagatataacttttacttgcttttatctaataccattttagcaacagtatttgtcatgttattaaaaattatttactagttgtatgtaattttgaatggtgcattctattccattctatagctgtatcataatttattattatttctccccattttacatgattcatgcagtatataagcgaggtagcaaaaggcttcttctactttgtgcccctgtctcgggttaacctctgttacattttggtgatacacacgcgtgtgctatgtcttttaaaaaccatacaagggatacatagtctgaaactttgcttttctcccacttactatgtttaggaaagctccaaatcagttcttttttattctgtttaatggctgcacagtatgcacagcttaggaaatgtatcaatttgttgacccatttccatagctctttgtacagctcttggtacttagaaaactatggacatgtctccaattttagctccaccacttactagctgtgtgaatttgggcaaattacacaacctctctatgctgcaatttactgatctcttaaaaccctacttcaaagggttggcatgcagattacatgggttaatatatgcaaagaatttactgacaagccctggcaggctgtaagcattatgcagtagtactaccatcactgttagggttctttaaggccctattacagtattacattcctgttttactcatttttgtaactttggctcctggcacaagggccaaggacatagcctgcactcagggaggaaacagctgactaaggcacactgagtgactcacattaggaatttgatcctaaaaatataacgtattcagaaagacattcttaaagaaggagaagaaacagataaacctcatgttgtaaatgtcacaggctgtactagggctgtttctgctcatgacctgtctagtcatatctctaaaaaagtcaaaatcaaggggcaccctgctcacaggctggtccctaagcttctgctgaggtggcttggctctaaaagttaatttacatgaatctcgttcctctcttggaagtctgaaattggctaagaaacaatctgagccaggcagtcaagagggaaaaagctagggggaatccctgaggtggtggggctagaaaggccttggctgtgagtcacactgatggggcaagagaaactctaagtgccaggcatggaaaaccttcaaaataccccaccctcttcacctgcagctccaattctaggaatttatcctaaaacagtgatcaaagtcatacactgagatgtctgtgctagagtgtttggcacagtactgcttataacgaaaaaaatgccacccatctgaatgcaggggattgtatggacaataaataaaaattagccaggtgtggtggtacatgcctgcagtcctagctactcgggagactgagactggaggattgcttgagcccagggtccaaggctacagtgaactatgacggtgccattgcactccagcctgggtgacagagtgagactctgtctcaataaaccaacaaacaacaatgatatgtagccaataaaaattatactgttgtataattaatagcatgaaaaatgtttttattatgtgaaaaatattagcttaaacagaaactttaaagaagagcagagaaaaaaaagatgaaagatatacactaactcatcagttatcttgggtggtaagacttcaggtagtttttattttatttttctttttagttctattgagacagggtctccctctgttactgaggctggagtgcagtggtgcaatcagggctcactgcaaccttgacctcccaggctccaaatgatcttcctgtctcagcctcctgagtagctaggaccacaggtatgtaccaccgcactcagctaatttttaattttttagtagagacgtgcagggccatgctgtccccagcttcaggtatttagaccctgttccacatcctctctccgcactcctggctttggtgtgacaatgtgactgttggcaccagtctgagacccttgaggggaagaggcaaggctggccagggcctcagggtacactggcccaggtgactcaactctgggcaggagagagatgggactacagggcagggaaagagaggagactggccttcttgagacctgctgcatgacgtagcttcatcttcctaagagccccgcgatgtggatatcaccatcatccccatcttccaagataccgagggaggccgtggagcctcccacatcacaaagtgagtaagaagagatggtcgattcctagcccaaggatagttcagacttacaggaaaagggttaccattccacccctatttgctgggcatgtgccgtgcccagcaccctttcaggcacttgggacacagctgatggaaagaactagggccctgcctgctgggagctcacattccacgagagggtgacaagtaaacatggagttaccagagggtgagggcaggtaagcaggggaagggagaaaagagtgctggctgggtggggaggaggagagtgaccaccaaggagggtgtggtcagggaaggccactctgatatggcaagagtgcgtcaaaaatgtgcaggaggcttggacaccagccatgctgatatctggtgggggttgcgagaagaaccaccagatggttcaggacagaggagtgacatgattgaatgtggaaggctccagtgttctgttgagaacagactgcaggaccaggttagaaggctccaggcagacagggtaggaggctccaactgtccagacaagagatgatgctcatttgatcctagctgacaacggtggagatgatgagaagtgactgggttttaaatagatgtggaagggggaagaaacagtatttgtacaagcacaggatgtggtgtgtgagagaaacggaagagctaagcacctctctcaggctttaaggcctgaacacctggaagaatgacactgcctttaacagacggggacactgaggaaggaacagtctggaatggagccggagtccgtattccagttttaagtagagaagcctgtcagacactgtgtggggaaaacttgctcctctaaccgtgcttttccctctactctcacaccacaacaatcatcaacacagaagaaaacttctgtgaccaaatgtgtgggggtctcaccccaccaccaagcagcggataccagccaggtgtcttccaatccaattctgacaccatctacctggagacagcgttagatcccacagcttgaggctcagtcccccagaatgttcccaccttcctgtccagtcgcaagcccaggcctctggaatttctgaccagttggcttcaactggggttccaacaatcccctctgggtttgactgatttgctagagtggttcacagaactcaaagaaacacttacctaagtttatcagtttactaagaatgtgtgtgtgtgtgtgtgtgtgtgtgtgtgtgtgtgtgtgtaagaatcacagctcactgcagtctcggtctcccaggctcaagctatcctcccacctcagcttcccaagcagctaggactacaggcctgtgtcaccatgcccagctatttttgtttttattattatctgtagacacaaggtctcattatgttacccggctggtctccactcctgggctcaagtgatctacccaccttagcctccctaagcgctgggattacaggtctgagccttctcagggccacagctcctggctctaagaaggatattttaaaggataaacagccagatgaacagacacacagggcggggtctggaagggtcctgagcacaggagcttctgaacctgaggagttgggggtgtgtcgccctcccggcacgtgagcgagttcttcttcactttcctgttggcctccacgggtttagctttctagaagctccttgaacccagtcctctagggtttttaatggcagcttcatgacgtcagcattccttcccccagggtatagggtaggatctcaaacccacaagatgggaaaagattagagtcctgccttggggtacataaaggagggcaggagagattctgtttcctgaggcctaacacatccagcattacaaccagactgtaacaagggatgtggacactataaaccaggaactgtggacggataccaatacatatatatctacagctccataggccattccttggttttcaatcacagatcccttataccaaaacaaatgtatctatcagaacatttgttgtagcatttataaaacagttacagcaatgccgccacctaaaatctggagaagccagtgtgggtagggatgaatttaaagaaatgactaatttgtcctatgaagtcacacaaacactttcataatcgtgtactagcctcactgttctttcctgccttggtctaccgctattggaccttaggataaacttgtgcagagctgtttcgcacagagatcagctgatggttagctagatccagttccttcttgggccgttttccacaggcattccatcctgagggagcttcaactcaacctcccaatacatctgatcgtatcagtattatcataaagcttatttacatgaggaagctgaaccttaccaatgcccccagtattacaccatattgtgatacaatcgtggtacaatttagcttcattatagattagtaagaatgacagaggtatttcctttgccttcccaataaaatctccccttgcccatataccaaatgttattaaggacaggtgttgttacaatggccatgactcagtcatttctggatttgaaattaattaggggcagagccaatcaccctgtctcatctcacaggcttgtactgctggtttccactgggtgctatcagttatagcacagcccacctgcctcctgcagacagtacatgggtggtgttaattttactaattaaatagagacagggtctcacttcattgcccaggctggtcttgaactcctgggctcaagtgatcctcccgcttcagcctcccaaagtgctaggattaaaggcttgagccacaatacctggcctatttctttcttttctttcttcctttccttccctttcttttctttctcattctttctttcttttttctttctttcttctctctctctccttccttccttgtttctttttctttcattcattcattcattcattcatttgatgggtgtttagaatagttcctatacctaccaactacactgcagaacatgttttactttgccctaacctaaaggcatgggcagtcatagcacattgatgtaaactgcaagtgccctcagagaacttccgtaaattcagagggccataagagtcccacaggtgtgccctgagcctcagcagccaagactgagggccactgccccccatttcagcctctatttgtattaaaattgtgaagaggccctgttgggtctgggtacaggccctttcccaaagctgcatcttagcattctcttcagcactgtttattgagttggcctggctcactctgccaaagcctccttatctttccaagctgactcccatccttttgccttcctcctggaagagaactccctctaatctgcattttcctctgaattctgctgctcattgaaagcaaactcaacttatcccaggatacccagacctgcacctatctcctataaggcccttttctgtctggtgggtcagtgttgtttcatccaacatgcatgttgctgcagtgtgtagtaaaggcctgagtacagttaggatatatgttttgcacccagaaatgttgggtgacccatactagagttagatgagtggtggtcacatctacatgtagtttagtgtgagtgtgccacaaggcctcctacagctttccttgtctcagggtgggaccattccctaaaggaactcagatccactatgtgatgcccactattttactgattgattgattgacagggtctcactctgtcacctaggctggagtgcagtggtgcaaacatggctcactactacctcgacctcttgggtccaagagatcctccagcctcaacttcctgtatagctgggaccacaggtgcggaccaccacactctgctaatttttcaaatttctgtagagacaaggtctcatctcatcatgttgcccaggctggtctcaaacttctggactcaggtgatcctccagcttgggcctcccaaagtgcttggattacaggtgtgagccaccgtgcccagccccactgctttaatcccattaagaacccagtgttttcctgtattctgcttaatagcttttcatccacaaaaggaacggtgataaaagtgtacatagcacactgcggcatgttgtgtatgctgccattacattttgtcctttacacccaaagatctttcaaagcatctgatcatcaaggtttatattaatagcgacataaaaatcagtctgctgggagccgtacaccacacatttggtatcagcgaagcaggatttgttggaacagctctgactcacagaaacatgtggtttgagaagagaaaggataaaagggtgggggatcaggaatctttggattcctatgtggccatgtggtcacccagggtatgaagccacagctgtgctgagatcagttactaaaggtaaaagttaccagtggaattcagagatggatccaactccccaggagttggggcactggatgcataaagaaatgcaaactaagaaaaaagtgaaatatttaatccctggttattgttgtctataatggctaaaataaaagagggtgctgggtcaggacttgaggctggactaagctcagatgtgggtctgcctgagcttagtccactagccttaaagttacccacaaaggagaaaattacgcagggacaacagaaagtacctctgagacttgtggttaccaagaaggtagtcaatgtgaaggaggggcaaaactaagtaactatggaaactagagggtatagtgcgaaagaactgtttcattctgtagatcagtatcatcagcttcctgaggaacctttactaaaacgcactgtaagagtgactaatttaggggcagtatctttggttttaaacactacagagtagaagtacatgtttggattgatgggacccacagctcactattgaacaactgcatatgggtatatatgatccagacacacaggaggctattcctgcggtaactggcagcttggtggaacagataaaagccactgtaaggtctgttcaccctgagaagggggactgtccaactctacctacaaatgtcaagtgggacaccccagatgcagtagctgatatgctctgtatgcatgtgggactggctttatgatgacagggctattcacacgctgaacatgcctgttacccaagtcatggtaaatgtgtggttaagagggccccttctacatgggcaccccatgtgatattactcctacagaaatgaacagttcaagaagccttattaaatttgctgtctcagcttcccttcatgggtcttatagatgctaataaaaatattaggttaattaacaagagaacagggaaaggcaaaagtgagagccaaaggactcctcccaggaaggtggaaattttaaaatggttattaacaaataaggtgaagaaaacactgataggataaaactaagaagaaaaagaaaggggagagtcatgggactcatcccagcagggtagaaatctttagatggttattaagaaatggaatgaataaaatggaaattgatacagttaaaacaaaggtctttgttttttgaggcagggtcttgctctgtcacccaggctggagtgcagtggcgtgatcttagctcattgcaatctctgcctcccaggctcatgcaatcctcccacttcggcctcctgagtagctgggactacaggcatgtggcaccacgcctggctaattttgtgtattttatgtagagacagggttctgccatgctgcccaggctggtctcaaactcctgagctcaaacaatccactcgccttagcctcccaaagtgctgggattacaggcatgagccactgcgcttaccaaaacaaaggtctttttttgctgttgttaaaaaataacgtgtcattcatgagcaggggccatgctaatcttctctgtatggttccaattttagcatatgtgctgccgaagtgagcacaacaaagatcttaatacaacattatcgaagcttgggtggaccaaacccctccgctctcccaacattaaacggccctaacccagtttactgtatttcttgcagtttgaagaaattttaaaagttgcaaggtagagattacaatgaaacatatgatatgaaattgcctggggcaaaaatggggcagactaatcaaaataaagattgacaaaaggtccagggtcctttggctcaacccttggcagaagacccaaagctttttgcgcaagagagagtaaaatggtctgggggtgaagaagttcctgaaactagaatataaaaatgtaagggttgataggatgatgaaagttggtatatttgaacacacttcatgtgaattgactgcatctctttttttttgtttttgagacggagtctcactctgtcgcccaggctggagtgcagtggcgcaatctcggctcactgcaagctccgcctcccgggttcacgccattctcctgcctcagcctcctgagtagctgggactacaggcgcccgtcaccatgcccggctaattttttctattttttagtagagacggggtttcaccgtgttagccaggatggtctccatctcctgacctcctgatctgcccaccttggcctctcaaagtgctgggattacaggcgtgagccaccgtgcccggccgactgcatctcttttatttgattgtatcatggtaatgaacacagtatcacactggagaatgtttcccctacctggtactataaaacagaaggcatgtaaatctgctctccaatattaattggacatgcccaagcctgcagagtgcagagtagaagctagagtgctggcagggacaaactctccacttgataaccccctgtggagcagttcctggggcttatggcaaaagtgttttgagcacctcccagcaacaactactgggactttggaatagagaatttccacttaagggaccttgctatgaaatgttagttgaagttacccctatgacatctgaaatacccatgctgtctcaggtgatgtccaagaacattctaatggggaaggcagtgcctagaagagttccacaataaaatggaaatggtttatagaggatcatgctacctgaggaactcaaggaggagatactccttgaggggagagagggagagagggagagagagggagagagggagagagagggagagagggagagagagggagagagggagagagggagagagggagggagagagagggggagagagagggggagagagagggggagagagaggggtagagagagggggagagagagggggagggggggagagagagagagagaggggagggggggagagagagagagagagagagagagagagagagagaaagcagagtttccccaaatcatctaagaaaaaaaagtattttttctcccctacccgatgcagtgatcctaggacaggagttgctgggacagcaaagatgatttttgttttttagctatggggtctcactgtattgcctgggttggtctccaactcctgacttcaatccatcctcccatccttccacagagcttagattataggtatgagccactgcgcccaacacttcaaaaaatttttagcaggaatgctaagtaaaaaactgtaaccatgtttttaaatattatgtcaaaattcctgagggcatcatgggggtgagatgtgccttcaccccttctaacaaaattggggctaacagtgaatatggccggtggtaaaaatagctcattggttctgcatctatgtagcctcaccctatctgaatgggagtggactgaggagctacttgctagacttgtattgctgcttgtaatctagaccagcacagtggtgattctaatgtcccttcaaaaaagtttggagattaatggagagaaggagaaatagtagctgagagtaaacaaataaatgggcaaatgagacaactcaaaagagtctcagggcaagagatgacactgcctcttagctcaatgattccacatgcctgagagggtgaagctgtgtatttacccagaccactcctgcttgtggaacctgacaatattgagaggaaacctgcaaacctgagtgtcctcatcatcctgggagacattcatacactatgatggactggactaattattaatgattgtgtatatatatgttttttgatataaaggatccacagtagaaaaccagggagtaggctgtggtgctatgatatgtattagttttcgtccacagttgctggcttataacccttgttatagtcatctgttattatgttaggtgtgtcaggcctctgaggcaggcccctgaccttctcttgccctcttattacctatcccaaggcaggactctattccgattgtgggtcttaaaacaccttccatgagagggtcctaccctataccctgggggaaggaatgctgacatcatgaagctttcataaaaagccaagaggacagggttcagtgagcctctggagagctgaccatgtggaggctcctggagtttccagaaagggcttggaagctctgcacctgatatagcttggctgtgtccccacccaaatttcaccttgaattgtagcccccataatttctacatgttgtgggagggatctgatgggagataattgaatcatgggggcagttccccccatactgttctcatggtagtgaataagtctcatgaaatctgatggttttataaggggtttccccttttgcttggctctcatttttctcttgcctgctgccatgtaagacgtgcctttcgccttctgccatgattgcgaggcctcccctgccacatggaactgtgagtccattaaacttctttttctttataaattacccagtctcaggtatgtctttatcagcagcgtgaaaacggactaatacagcaccccttcccccatacttctctctacacatttctttatctgtatcctttgcagtatcctttatgataaactggtaaatgtgtttccctgagttctgtgagctgctacagcaaattaaatgaatccaaagagggagttgtaggagccccaccttgtagccagtcagtcagaagttctgaaggcctggacttgcaattgatatgtgtgtgtgtgtgtgtgtgtgtgtgtgtgtgcgcgcgggggggggcagttttggggactgagctctcacccggtgggactggcactatcttcaggtagacagtgtcggaactgaattcgaggacacccaactggtgtctgctgcttggtgtgtggggaaaaatccccacacgtttgtcacagaaatcttcttctgtgttgatgattgttgtgatgtgagagcagaggaaaaacacagttagagaattatcccccacaggcatcaagtggcgatgtgaaataggctgttgttggtgaattcggattatggacgaatactttggtaggagatagaaatgtggagctttccacattgggaggctgaggcggggggatcacctgaggtcaggagttcaagaccagcctgaccaacacggagaaacccctgtctctactaaaaatacaaaatttgatgggcgtggtggtacatgcctgtaatcccagctacttgggaggccgaggcaggagaatcgcttgaacctgggaggcggaggttgcggggagctgagatcgcaccattgcactccagcctgggcaacaagagtgaaactccgtctcaaaaaaaaaaaaaaacaaatacaaatgtggagctttccagatgggtgtaaagctgtgggactgtttggatgagttaaggagtaagggaagatgcagaacagaagcagtccatgaccacggcctgtggtgctcaacatgctgaggtggaggagacgagaaagcagttaagggggtcgggaaggaactgacagtgcagcgagagtggacaggtagtgtccagaacacaagtacatagcgttccaggcaggggagaagcagtgactgtgccaagagctgcagacggccaaggaagacagggctgaagcttaaccgctggcccatcggcttgcagagggatggaaagagaggatggatggatcaatcttggctctgagcattaacagctgtgaacttcacacacagagacaatgcgatggtgtacacctcgtgatagaacacactaccacctatgaagtggttttgccaaagcctcaatctatctgatcaggtttctggaatcaacttccaattaataggaaatatgacaggcaggggaacacgttagatgaacaaacacgaggggatggaatctagactggagaaatctatagaacgaataacacagtttcttcaacaaataaaaagagagatgcaggggaaactttagcctaagacacttagagacaaatcaatcaactctactgtgtggactttattttaatccttattcaaacaaacaagttcttaaaaaaaaaaagggggcaattgtgagacagctggatatgttaacactgggtatttgatgatattaagaaatttttgattttttagacatgatgaattttttgatgtagtaatagaattgcgtatgtatgaaattggctgggattcgctacagaattactgagagtggctgggcagggaactagatgaaagaagatcaggtataaactgttaagtgctggaatgggtgataagtatgtgggtgtggtggaggaggctgcaggatactattctgtgtctttttttgtatttctgtatatgtttattacggaaaattccaaatagtaaacacacacacacacacacacacacacacacacacacacacacacacagagagaacgagagtagagcaacggggtggtggtaggagggacacaggtcttcatgggtattgacagtaggcctgccctgatagggcaagtcagatggaaggaaacagcaatgcaaaagatggagggacacctgctggagtctgtccccgagggggtgggagggtacaaggtctaccttaggaccacggccaccatgccaggcaggtggtagtaggggtggactcctgtgctgactcaatgaggaacagaaacaaggtgctcctaaggagaggagagacagtgtaggggagtgggctgaaaggttgcggtgctgggactgctgggcagccccagatgaccatgtgaggtcagcagtcatagggagagccagactgccacactgactgtgcctctcagaagtcagttgagtggcagaacccagcacaggaggggcaggagctgagggagcacatcagggagtgactttggtgatgggctgacgccatgctgcgagggaagggagggcatggaggggatgggtgcagggaagagctggcggcagttgcggtaaagccccatgggcactgggaagtgctggggtctgctgctagagaaagcaggctggagaggtagggtgatatgtgagcgatctaggacggaatctgggcacactgtaaatggggatacatgcctgggaaacttgtttcaaactcttctgagatcaaaacagcccgttgggcagagtttaaaaataaaagacaacaaaaaccaaccctagataaagactcagcaaacccaggggaagtcttgcatctgttctacggaaagtgaatcagcagtcatttgggagtcccctcatcttactacacaggagcctggcctgaccagtcagtgctcttcaaagtgtgttacttcactgaagaactctagagagtggtgaatttcagcttcccaatactaacccccagtttgacttctgctcaaactaggcaacggagcactagactggggtcacaaatcttgctgctggcactgaaaatccaaggagcaggccctgagctcctcggagcttccgtctgtatccaaggtgggccctgctggccttgcaggcttatagaaggatggaatgatctagatgctcctaaaggtattttgcagctttaaaggtaaggtatggtaacaacaacgacaacaaaaaaggcataactatcacttgtgttgtaataagaagactgaaattttggtttcacaaatgaaaaccttgtcagcattaaagaagactcagtcaaagagctgagtgtcttagcttggcaaaaaaacagtatttatagacactgctttcttgtactttgcagagcatgggtatctctactctgcacaacagatgccatcctagggaaggattcctttgccacccacttgctggggactttctgaaacatgacttcattttgtccttacaaaacctcacgaagtattattttccccattttacagatgaggaatctcaggtttagtgaagctactacgtcacctgcccaaggccacacagctactaagtggtagagctggtgttggttcccaagtctctctgattatgtttataaggggagaaagaatggttcctggggattataataatgtaatgtctacaaaattattatgtattctggaaaagtatggtgctttgctaatcaccaaatttgagtttataaatacctttcgtcatttaatgtgtatttactaggcatccactacatgccaggtgctgctctaggcatttgggatggatcaatgaacaagggagataaaaaccttgggccccttggagggggtagtgacactttaattacatgtaaatgtaaaaatgatagatcttacctttctgaggtagtttaggaagaactcttgggccaagggcagtctttgcagaactggtgctaatcaacaaataagaatcatttaggatctaaaagtgctagaatatcaatagcaaaatattattcaagtaaatcaaatcaaaggtatttacataatcatctaaagaatgctttcaaaatttcctttttttttgagatggagtctccctctgttgcccaggctggagtgtagtggcgcgatctctgctcactgcaacctcggcctcctgggttcaagcaattccctgcctcagcctcctgagtagctgggattacaggtgcccaccaccacacccggctaatttttgtatttttagtagaaatggggtttcaccatcttggccaagctggtcttgtactcctgagctcgtggatccacccacctcagccttccaaagtgctgggattacaggcatgagccactgtgcccagcctcaaaatgtctttaacaaaagattagtctattttccatatttcagtttgcctggctgaggaggcacagtaaaaggatgaaaaaaaagtccctcttaatgataaagcccaactcctccacttcaaagcatttatgaaggcacctggcacactctaagtggtgaccccaatgtagtgcacagaagtaactcttcccacatgatcccacaaagcagctctgtgtttccagacaaggaaatggaagggaatgggggtgttggcggctggcagaaggtctcacgtgggtcagaggtagaagtggaaattcggccctagctcccctgggcctccagagccctcacttcctccactatagcaaagagcttggttctcgggcctccaggctctcctaggccttgctttccttttggaggacaggtaaatgagggtgacaaaggcccaagtccctggaatacaggtccataccacattgtctaaatcatcaaacgttaacctctgcaactgaaaccccagtgccatcagtggtctacattaggtggaagccactatttttctttaacaagaggttttggcgattctcagaggacaccaggaggcctgcatgcctgagaagcagcagtagccaagtgcctgagccccatctgccaagaacccctttattatctcatctctccatttctgtcccctgatgtcctaagagttggttgctgctgctgctgctttttttttttttttttttttttttttgagacacagtcttgctctgtcaccaggctggagtgcagtggcacgatctcagctcactgcaacctctgcttcccgggatcaagcgattcttgtgcctcagctaactgcatttaaaagaaaagaaaaagccaaaccaaccaacaaaacaaaaagtagtcaaagagagaagatgaaaggtgtgtgctcctttctgtcctggctcttggccatccttgatcttcactgctctttcctcagctcacttgaaatcctcctgtctctgggcaacgggggaatattgctgagataaagccaccactaaacaagaaacagtaaacatgagagggctttgtttctcttgaaagagactccatctcaaaagcaaacaaacaaacttaacgagttgccaaaggctctagttcacaatcagcttgattttgtttaaaaactttttttttttttttttgagacgaagtctcgctgtcacctaggctggagtgcagtggcgtgatctcggttcactgcaacctccacttcccaggttcaagtgattctcctgccttagcctcctgagtagctgggactacaggcgcaccccactatgcccggctaatttttgtatttttcgtacagacggggtttcaccatgttggccaggctggtcctgaactcctgacctcaagtgatccacctgccttggcctcccaaagtgctgggattggttctcccaaagtggcgagagccactgtgccctgccaaaactttttttttgagacagggtcttgctgtcgccccggatggagtgcagaggtgcgatcatgactcactgcagcctcaatttcctgggctcaggcggtcctcttgcctcagcctcccgtatagccaggtatgtaccaccatacccggctgattttttttatttttaggaagcaaggtcttgctatgttgcccaggctggcctcaaacttcggggctcaagcaatcctcacaccttggcctcccaaagtgctgggattacaggtgagccactgtgtccagcctttaaaaaccttttatgagtgcttttggagtgtcagatattctcctcactctggaaaaagaacaccagaactttagttttacagggtcccccaaattagggttgaaggaaggtgagtgaggaatgaaaggcagggcacaagggcaaggaaggggtgtggaatgtggagttgggagaacaagtaggctggagagctggctctgacatctgcacccaccacctaaccactctgggcctcgctctcctcacctgcaaaactgaggataatagtaattgggcctatctcacagggttataaagagtacataagatagtggtattaaaaaaaaggctggatatggtggctcccacttgtaatcctagcactttgggaggctgaagcaggaggattgcttgagcccagaagttcaagaccagcttgggcaacatgctgaggccttgtctctacaaaaaaataaaaaaatcagctgagtacagtgatgcatgcctctggttccagctactcgggaggctgaggcaggaccatctcttgagcccaggaggttgaggctacagtgagctgtgctcataccactgcactccagtctgggtgacagagaaaggccctatctcaaaaaaagagagattttgttttctcatctttcagaaactctggataagagctgactctttttccctgaagtttgggtctggaagtggctctctgtcctttccttggatggcacctccagagaaaacactttagggtaaggctggataaaaactgcccgtaagagatctcctcaagtatacaatttcagtgaaaaaagggaagaaaagaacactgctgtcagcctagcctaaaaaaaaaaatattagaaacagaacttgaaagagtgctatttttatgtttgaaaatctccaggcaatcagatttccctaaggattatcttttcatttccaaatctgcaaaaggagtcaagtggaaaagtaacaaagttacttgattaaaatatcaaaaataaaaactcattctgacaggaattttgttcaagaccactgcacaaccctgcgaccaccgggaagtgaggttagctcctgtctgtgaactgggtagacagcgttgctgctcagagaacggtctgcagacctgtgcccagtccagtcacaagatgtgcatgcaaaccaagagtgaacgtctggtttcttgttgtggcctgccccacttggctgaccacagctttgagcagcgctgggaaattcatgaaaactcatttctagaattctgtccattgcatcaatggatccaacaggggaaatgaagcgctgagatggcttacctcgactgctgggatagtccctcaaacttgtttgtagtcttacttgaagaggatggacccccatcgttacctacaaggaaaaccgaaggtgaaaaggtatgtctttagatggggaaatgcaatgagaatacatgggtttggcctgtagacaggcattgctcaggttccagaacggcatttaaaagacccaagccaaaacggcatgcatttctggcctaagaccaaaacaaaactgagcactgttttgggctttgcggttttttatttctggtaaaggagtgtatcaaagaggtgagcagctgctctgtggcaaggcctcaaagagcatagaaacttggtgatgttcccactggctcaggatcttgtccttagtttgagggtagagaaagaagaataaatttcaagttcaccaagaggcctcatgctaggagactaccctctagtatccaaactcagaagaaacacacaactcacaagtggaatgtgcatgtgaacaccattagcagggtggtggataagtggtcatctgttgggccaggccctcaggcacttactgactcgtcattcattctctctctttttttttttttttttgagacagtctcactctgtcacccaggctagagtgcagtggtgcaatcatggctcactgtagccttgaactccagagttcaagtgttcctcctgtccagcatcccaagtagctgggactacaggggcattcattcaaatattaactttttttttttgagatggagtctcactctgttgcctagactggagtgtagtggtgcaatctcagctcactgcagcatcggcctcctgggttcaagtgattctcctgcctcagcctcctgagtagctgggactacaggcatataccaccacgcccagctaatttttgtatttttagtagaaacagggtttcaccatgttagccaggctggtctaaaattcctggcctccggtgatccacctgcctcggcctcccaaagtgctgggattacaggcataagccaccatacccggccaagtattaacatttattaagcatctactatgtgcaaggcataaatgtgaagcagaaggcacaaaaacaaataaaacttcactgctctcacagagcttatgctctggcctgtgagacttaagacataggaaatacactaataatgtgtaatgagatgaacatcagttgctgtcaattgaggagaatagtttctaaactctgactgctggcaggagtggggaagagggagtagggaatgctgtctggggaagacatagcacctggacaggtgaagaactttctagcgggtgagcagcaaaaccagaggcacacaggtggaggtaagtgtgctatgtccaggagagggtcacaagacaataaatgagggctcttctatgatccattttgtggtgggcagagtgcagggcagttgtggagccccaagctgcaggcacccaggaggattccccgggaccctgcatgggcaccctgtctctggggctctagttcatttccttgtcctttcttcctatgactgctctggaaactcttgttctcttctttcagcagcctcctctcctcctctacctagaagactataatactgcctaggtggcactgggaatgggctggctgaggaggctgagcaccaggagggcagatgaagagggcagggctgaaaaaaaactaactgatcctcactacactgcacatctgctcaatagcaccaccgattgcccacatgcttttatattcatccagccttccttcctcacagcatgagactggcatcataagataaggaaatgagactaaatgaataaatggctgcaggtcccgtggggaaatggtgtacctgggagtcctgaccacaaatcaatgtgctcttcattacccatcaagacgccctgatagtaacattattaacagcaacgaccgtttactgagcacttactgtgagcaacatactgtgctacatactcatagtaattatgcttatgagataaatagtataatcacccctcattttatatatgaagaagcacacagagaagtaaagtcaattgcccaaggtcaggtcactggtaagggtcaaagctgggatggaaagccagcagccctcttccagggtctgtactgtgaatcaccacactctagcacctatcacctcctggtctgactgcacctactgaagagggagaggctggcagggtgctcacctcctggacagaatgttctgtaattctatgatattgatacaagaagaaatgagataaactggcattactagaagaaccaaaggctttcaaatttagttttatttaattttaattaaactaaccatcagtatatgttcatgagcccatataacttaatatttaaggacttctttggtaactcataaaatcctcagagctgtgatgttcttcaaggtagggcatttattttttttcttattttttatttatttattttttcaagatggggtctaagttgcccaggctggtcttggactcctgagaccaactgatcctcccaccttggcctcccaaagtgttaggattacaggtgtgagccaccacacgtggccttttttttttttttttttaagagacaagttcttgctctgtcacccaggtgggagtgcagtggcataatcatagctcactgcagccttaaactcctgggctcaaatgatcctcccgcctcagcctcccaagtagctaggactacatgcatgacccaccatgcctggttaattttaatttttattttttttgtagagacaaggtctcattactaatttttttttttttttttttttttggtagagacaaggtctcactgtatttcccaggctggtctcaaatacttggcctcaagtgatcctcctgtcttggcctcccaaagtgctgggattacaggtgtgagccactgcacctagcctggtaggcatttctttctagcactgtgctcaatgatgagtcttcagggctagatatcaaatcttatactttcccacttaaatgagttataacaatcaaaacgtcaaggaaaattttatgtttggggaatgaactgttacatccactaattccctttccaggtagaaaacattccaaagaagtgattattaatgcaggttgcatgtgctatacatgagtaaatttgagaccaacagggctgcaaaggccctctggctctgctgtggtcattcattctgctgtcacacagacgagtcatcatgtcaggggctgctgcccaatacccacaggcccaaatgtccagagttctcacttaaccttactctttggcttctcaaaatgagtctcctttttccaaagatggtgtgagtttttatgtctctgtaactttgccccttacgttccttttccctgcaaggaaggcctgtctccttccagttttggtgaattcctacacaaccttcaaagaacacctttagagtcactttctgagaattcttccatagctgacttgaccagcccttataaccagcttcttaccaggagtggttaattaggggtgcagattttggacctagacaagtgtggctttgaattctagctgtactgctgaccagtgggtatgagtttgggtgacttcttattctgctaagcctcgattccgtcatatatcaactgggaacaaccatggtacctactaccctagatgggcatgagtattaaaggaaataaactataaagtacgggacacagtgctagaccacaggaagcctgacacaagggtattattattcacagctcttcaatggcatgaaacagaaatgatgttaatttactcaatgagtggtcacttcaaagaatggaccccaccttctatgtcttggtaacaccattatttttatttttattttttctgagatggagttttgctcttgttgcccaggctggagtacaacggcatcatctcagctcactgcaacctctgcctcctaggttcactgattctcctgcctcagcctcccaagtagctaggattacaggcatgcgccaccacgtctggctaatttttgtatttttagtggagatggggtttcgccatgttggccaggctggtcttgaactcctgacctcgagtgatccacctgcctcggtctctcaaagtgctgggattacaggcgtgagccactgcgccaggccgataacaccactttttaacaaaatgtctggcacagagcagtcaatagtccctgctagcgaaagacaggactgaccgtgctggctcatcaacttctctgcccacagcggaccttcttacacctggctgggtaggcgtctatggtctggttgacaagaatcctgtcactctcatagctatgcaaaggctacctgctgtgcttgagaagaaaagtgtggctagaaaaaattctgaaaataaaatagtactgaaaagaggacaatgagcagcaaaaatatggaagcaactcaatccctttttctctctctgtgcaatttggaaaaaggtcttagtgtatcatacagatgtgtgtaagagaaagttggagatacctcctgggcaggcaatggaagaagtgtggccaagactcctggtcacctaccatagcttcgaagctacaggagaagagtttgtggaaagagagggggcattggctcagcagcgaatggccaggttgctacaggagtattctggaatagtgaattactatacaggccttggagttggaaatgggttcaaatctcacttctgcagttcctggatttgagatcttaagcaagtcatttgacttctctgtgcctaatttcctcatcagtaactgggacaatgacagtcccacttccaataagtagatatgtaataaaacaaacaaacaacaagaaaaaacaaaaaaacaaaggaaaagaaaagaaaataagtaaatatgcatgtctcagacatttcatctatggagcttttttacctggaagtcccaggcctgaaatataagcagtaaaccaatttttggtatagtttttcatccattatttgctctatattaaataaaagtacaattctaactcccagtgaccaaagatgaggaatgtaagtgattcccagaggtcactttgtcagggattggtagaacctggatcagaacctgggcttctggaatgttctttcagtgcatgttatggtttcccacgtgcactgcagacacttctctaaatgccaaaggatggagggccaggggaggggggaaattgttattaggtattaattcaagagtgttagaatagtgtcagtcttaaggctaccatgaacctaacaattagttgtatttctctctttgctcttgcctgtaagaatcttagggtcaaatccgtggcccacttccagacactgtatgtgactttttgttactcattttgtggagaaatcacactcctggaattcaccttactttgctacctttattctccctttgtcctcatttcttattatttaaattgtgttaaaatatgtgttagtctgttataaagtaggttattaaagaaagaggaggaccgggtgaagaggctcacgcctgtaatcccagcactttgggaggtcaaggcaggaggatcacctgagcccaggagttcgagaccagcctgggcaacatagtaagaccttgtctctacaaaaattaaaaaatcagctgggtgtggtgtgacgcacccagagtcccaagttacttgggaggctgagatgggaggatcacttgggcccgggaggttgaggctacaataagccatgattgtgccactgtactccagcctaagcgacagaacaagacgttgtctttaagaaaaaaaaaaaaaaaaaggaaagaggttcaatgaaatgcaacttcaaaaatcataaattccctacaaaacccaaatctgtccacaggactatttgttttgctatcaaaagcctgccttagaagtctcctgagacagatggctggattcatcacagaagcaggacttcagtaatgtaatgctggggctattttgggcactgtggatgttgtggttctggcagggaaaaagcctggggtggccctcccagcctgggcagcgcaggagctgcataccagggtgccatgctgcagatggataaggaggcacagccagcagagcttgtgctgcttgccaggagaaccatgctaagttgatcgccttctccacacttcagcttcatgggcacagaaaccactgctgtgaggagaaatggccagtgggcctgcattttgcgagcacagagtggtgcgtggagagggtgaggagggctggctctcagccacacaggctgcaggtgaatcctggcccccacgtactagctgtgagaaacagtgtaaatcacttaacctttctgcgccccgaagttgagataatagcattttctctctgtgtaaccatggttaagaatgaggtacgttaacacatgcgaagtgctcaacacaatgcccagcactctgtgaggcacttacaagtgatggccttataaaatattacgtacgtagttttttatccgaagattctaaaataatgaattgtcattttcttttgtcttacaagccataaacctgtattaagaatttatgggctgggtgtggtggctcatgccggtagtctccagcactttgggaggccaaggcaggtggatcacataactcaggagtttgagaccagcctgggcaatatggtgaaaccccgtctccacaaaaaatacaaaaattagctgggcatggtggtgcacacctgtagtcccagctactcaggagactgaggtgggaagatagcttgagcctgtgaggtggaggctgcagtgagctatgatcacgccactgcactccagcctgggtgacagaataagaccctgcctcaaaaacaaagaaaaaggagtttatgaaggcatgaaatggaatttgagagggggaaagacagactctttgtaatgaaggaagtgtggccttctgtgaagtagatgcattaaaggttatgatctctggccctcgttctcacaaaacactcaacatcagctgccttgcttatttcctcctgcctattccactcatcttccaaggctaaatgcaacatctacttccttcttaaaccaccttctacctccttcttaaaggtcagcatgggggactgggcggggctaatcatcagcatagaaagtgtgatcatcagcagagccaagacctgtcagccatggctactctgcaaaggagctgaatgtcagaggtgcccctgagaccagaaacacaaatgtcggggaaccaaagaggggtataggcttcacacttgacaggtgggccaagttcggtggctcatgactataatcccagcactttgagaggccgagatgggtggatcacttgaggtcaggagtttgagaccagcctggccaacatggtgaaaccccgtctctattaaaaatacaaaaatcagctggacattgtggcgggtgcctgcaatcccagctattcgggagactgaggcaggagaattgcttgaacccataaggtggaggttacagtgagctgggactgcaccactgcattccagcctgggcaacagagtgagtctgtttcgaaataaaaaaaagagaacttgacaggtggaaacctccacctggctgaggaaagaggctaatgtgctgcagggaggggtcatgggagtgatgccagtgctgctgtatggatggctagtgagactggtgggtacaacagagtggtggtgtgaacaggtggcctaaaacagattgggacaggaggcctcgagtcttgcctactttacaagtttgattccacatttaatgttaggcaagcgatcagcgtgaacccattgatctaaaaaatagagagctgctgacaacaactattacccccaaatctcccctgtgaatctggaggaggaaatcctaggcacagtggggagaggagtacatgacagctcacatcttctctgaagactagaaaaaacaatggccaagacaggggtttgagacttttgaggttgctgggatgggtgaacatattttgcatgtgggttggatgtgactctttgggggtcagaggacaagctgtggtaggctgaataatggccacccaaagttatcgagtcctgatccctggaatttgtaaatgtgacctgactaggaaaaagggtctttgtaaatataattaagttaaggatcttgagacaaggagattattttttttgagaaggagtttcgctcttgttgcacaggctggggtgcaatggtgcaatctcggctcaccacaacctccgcctcccgaattcaagcgattctcctgtcttagcctcccgagtagctgggattacaggcatgcgccaccatgcccagctaattttgtatttttagtagagatggggtttctccatgttagtcagactggtcttgaactccagacctcaagtgatccgcccgccttggcctcccgagacaagattatcacagaaaattcatgtgggtcctatatacaatcacacgtacacttatgagagagaggcaaaggcagttctgagaacacagagaggcggcggcagtggggagatgaccatgaaggcagaggctgcaccactccacggatcacctggagtcaccagaagctgagagaggcaagaaacagattcttcccacagggcctctggagggagcaaaaccctgctggattttggacctctagcttctaatactgaaagaataaatttgtcattttacaacatccagtttgcggtatgcgttacaggagcctcaggaaacgaatgcaggtttctcccatctctagctatccagcaaaatgctaggctgagaataatggtaacagtagctatcatttattgggtgctgcctatggttttggttgctttttatgtgttcttctcatttaatcttcataactccatatgcaatacagacactattactagccccatattatagttggagaagctttggcactgaacatttcaaagatacttgctgaaaatcacaaggctattgagtagtagagatggaatgagaatccagacagtatgacacttgagttcaccttagagcactttgctctgctgagagaagcagcacatgccctcagaaggagttcatgtactaggaaagacaggcaaggaaacagccactgtgatacccactacaccagtggggacaaaagggtggggagtggggagttttactggactgcaaaaggccttttaagtagatcccaggacagcagatcttgaaagatgactaaacattaacataaagaagtagagggaagaagattctaggttgagggcatactgtaagcaaaggctcagatctgagagaaaaaaatagaactttggggaatgtggtgtacctcaagatggcagacatgttcagctttgggggtggagaggtaaggcctggtgagagctaaggggctgttcttttactacctgctcgtgcctggtgtctacctcccagtcctgatctctcacagttcaaaggccctgatcctcatgggctgaggagagatgagaggtttaggggaacataagagcgttggaaaggtgcgtccacagacgaaagctgcaggcatcagagaggaaggttgcctagaaggttgatcccctaagtgccttgctgatgacctgtctgggccctgcctttggcttctacaatacaatgtcagcaggaggcggggaagggataaaaccaagcagtaataatacaacacagacctcaagcactaggagcagagcaactataacctttctaaggagaagtccagccgtgtatgaatgcacccacacatacatgcccattactgacctgtgtctgtagacagtatatctcacatacatgcatgtacaccaacatatgctttctaaaatcaaaatttaaaaaaaaatttaaattgttttttaaatttaaaattttgatttcaacaatcaaaagtccatgccatgtggcgaactgtcactgtggccgaggacagatgatgatttttgtccttcaaggctggttgtaggtgagaggctcttagctggtgagaaactgacagacagaacagcgtcctcatctggaaaaggttataaggctcccagctcactgtcaggcactcttttaaagtaaattttgtttaataaaaaatgctccctgacccatcaacaatggggggaaaaacggccagctgctagtcttgctcttgagtgatgtgaaaatctaaaaaagtgatgattttcaagccagaaagcagaaatttggtaaatttatttgaggaatgttcgagtctatacaatgtgaataaaggcacttcaaaccttaagaaataaagccacttaaacaagaggattaaaacttaagagaaatttggaaaggaggttaatttgtgatatgaaacgctgatgtgaaacttgtgactttcatggaatgttatttgggggaaaggcctttttgatgaaatctggggatcccgaaggccttacacagcagcctctgaaaatgtcacggacatccttagtctttatgtacatatgtgctagcacacctcaattgttcttgcctggcttgtgggaactaattcattaacaccaaactccaatgtctcctcttctctaaaccttccctggctttcctctaaagtctgacattcagttttctggcatttctagtgtttagacaacatgtctatcctgatagtaaagaacatgtgctctaatgacttacccacgtgtgtcctgcattagaccatgaactccacgagcatatggactgagaaggcccaagcaaggggcatagtaagtgcctcaagtaagcaaacagagtcagagaatgaacggctaaatgcacacacatgcttgcacacacataacccggggtgtctgggccagatggtgaacaggtgacaatcagcaacgggacaatataactttcccccaaaactcaaaacacaaaaaatatgaagaaagccacaatgaaactccacagcaggaagaggtgagacacacaaactaacaaatttattcagcaaagcttctgtgagtgtctgtcacgggccaagaccctgtttcgtgatggggtgacccctaagtcgctagcaggctagtagtaaagatgggaattatgtcccttgtagatgggaatttgtcatgtgcagtcaatgtcactgaaatgattaacaagctgactctgggcaaatttattcattctcaagtgattcctgaatattcactgtatgccaggcgtggttccagtaaacactggtgagaacaagaccaagacaaggttctggctctcatggagcttacattttagtggggcggcttacattctgtgataaggtgtttgggggaaaacaggtagggaggaagctgcgttggagggcgggggagatagacatgctggctgagaactcaaggatgaaagggaagcagctgttcaaaaagcatgacagagttccagggagtgggagggccctcaggaggcagaggatggtgtatccaagaagtgaaagaaggccagccctgaagatagagtggcaggagagggtctaggagataagagcccgatcatgcagggccctgtgggccttgatatagggagcttgcatttatctgaagctcaaaaggaaatctcaaaagggtgttaaggagaaaagtgaccatgagctgatttacactttataagaaaaccattctggctgttgtgaggaaaatggattactttgcttttctgagcctctgtttccttatatataaacgagactaataatacctacctcacagagttgctattataattgagtaagatttaggaagtgctcagcaccttttagtttttaatggcctaaatatttttcaaaatgttcctttcccttaagagacaggtagaatcatgtcatatatacccgagtcagcacccagcatgtgtgtgcattttggcacactttctgaatgtgctaacaggccactgcccagtggagccccacacgctgcctggccccagcagctttggccctgactttaggataacttaccccaaggaactgcgcctttgtttgggggcccatgaggtagtgggctgggagggtcggatagggttctcttgtgtccgggtggtgggggaggaggcctcttcttggatagggtggagctgccactagaggtctgggtgcttagagggagtgttgaaggtgggccagttggacctagaaaggaaattgaatgggggcaggaagattaatcccagtctcacagatacaaaacagccagtatgaaatcacttccacacatcagaatgtggtatgacacacagagacaaaagcaaaaggctggatatggctaactccatcaacctaataactcacaagtagggtttcaaaaatttggttaaaaaaaaaataaaattggccaggtgcagtggctcatgcctgtaatcccctgcactgtagaaagctgaggtgggaggattgcttgaggccaagagtttgagaccagcctgggtaacacagcaagacgccatctctataaaaatttaaaaaattagccaggtgtggtggtgtgtgcttgtagtctcagctacttggaagactgaggtaggaggatcacttgaagtcaggagttcgaggatacactgagctatgattatgccactgcgctccagcctaggcaacagagaaaaatttacaacaaaggtaagaagagtgtgtgcttttaggaacaaaatgccagtcaacacagaatgctactgagtttagatcatttaggtacaatgggaaaaacaaacacacacacacatcttaaaacaataactccttataaccatcacagaacctactgaaggagaaatcacacaccactaccagcaaaatcaacagagaaagaacagagtacaggctaagccttcactgggccacaagctgaaacatgaaatgattcatataatagaatttttctttctacaactttttcttctagtcagcaaactgcctgacgcttttcttaaaaaaaaaaaaaaaaaaattaaggcttttctaaataatgaagaaagaactggacgtaaagcattacctagaaaaaagagaaatccaaaaaccctttgctctagaaaccaaaccatctgttatattggaagcctgaacaacatttatatagacactgatttttatagactaaaaaaaagactcaactttctccagagctaaagacaagacagcaggaatgatagtaatattccacatacacacaaaaatggggttcgtttttaaaagctgttaagggagtagtgtatttgatcttagttttgtttattcaaagtgacattgaagtggctggtgtgtgccaggtattccatgctgggcactttcactactattgctttatttaaggtatatggtttaactgtgttcatggcaaactgcttctgtaaacgttaagaaaaaaaagctaggaccaggcacggtggctctcgcctgtaactccagcactttgagaggccgaggtgggcagatcacttgaggtcaggagttcaagaccagcctggccaacatggtgaaactctgtctctactaaaaatacaaaaattagccaggtgtggcggtgcacgcctgtagtcccagctgctcgggaggctgaggctggagaatcgcttgaacccaggaagtggcggttgcaatgagctgagatcatgccactgcattcctgcctggctgtcacagcgagactccgtctcaaaaaaaaaaaaaaaaaaaaaaagaaagctaagaacactgccacactgaatgtttaacacagattagtagatacctagtaatccagaagggctccaaaagagctttatacactcttcatattaaaaaaaaaagtctaattactgctggcctctttccttggtacaaagtaagctttcctatttcccattgtcaattactagtccctaccaatattgacttaaaccattatttctataagataggctagttctgaaagtaaatactgttaatctcagtaaaattatcatctgctttaggtttaaattgccaggctatataatttacatctttgtcccattgcgtaattctattacacaatggaagcctgatgcttaccccaaatcaacacttaattagggtgtcagtcacagcagttttcagaaactattttatttttgtaacaatacagagattgttattatggccttgcatctgtataatgctttgtagttttcaaaatgtgtttatatatgctattcctcagcttcttccctaggtttatcgttaaaaaaaattttttttgagacaaggtcttgctttgtcatcctgcttggagtgcagtggcaagatcacagctcactgcagccctgatctcctgggctcaagcaatcttccctcctcagcctcctgagtagctgggactacaggcatgtatcataacatccagctaatttttaaaaatttttaaatttttagtagagacagagtctcactctgttgtccaggctggccttgaactcctgagctgaagcgaccctcccaaagtgctagaattataggcgtgagtcaccacgcctagtctaaatttaaaaaaaaaaaatgtttatggatacgaatagttgtacctcttcattttcatactaactctgtgaagtatgtgggtcaggtagtattgtccccattttgcagccgagaactcagaggcatgattaaagtcacaagccatgaggggcagagctgggataaggcaggtgtccaggactggcgaggcactcaccccatcaaatgatgctgctggttcctgaaagccagagcagcatttcctgtgcttggcatatgaggaaaacaacaacaaatgctcagtatcaggaagtgtaactttccttttggaaataaatggataatagataatagacaatggtgaggttctctagcaatttcatctttatcgccatctagggactttctgatgcagatgcagttccctgctaggaaacaaaaattgtcaaagacaaaatgctaatggagccatgtctctgagcaacgctgcattatatatgtatgagactgtaggagagattacaccaaagaggcatcctgtaaccataaaccatgtaaaatccaacctcctgaatcatttcaaaaattaagtaattgtgcgtcccatgcccttatatacttctgacttccttcatattgctgagtataatctctaattaagtctttgtttacttacttgttacctgactctcccataagactgggagagttgtattagggccaggcttttctctggtttcgtgtagagtaaatatttactgaataaatagaagactcaaccactacttctatctttttaggccagtgattttttttttttttttttttttttgagacgcagtttcactctgtcgcccaggctggagtgcagtggcgtgatcttggctcaccgtgacctccccctcctgggttcaagtgattctcctgcctcagcctcccaagtagctgggactacagatgtgtgccaccacgtctggctaatttttgtatttttagtagagatggggttttgccatgttggccaggcaggtcttgaactcccaacctcaagtgattcacctgcttcagtctttcaaagtgcttggattacaggcgtgagccaccatgcctggcctaaggccagtgattcttttgtcttttttttttttttgaggcagagctttactctgtcacccaggttggagtgcagtggtgtaatctcggctcactgcaacttctgcctcccagattcaagggattctcctgtctcagcctcctgagtagctgggactacaggtgcacgccgccacacccggctaagttttgtatttttagtagagatggggtttcaccatgttggccaggctggtcttgaactcctgacctcaggtgatccacccacctcagactcccaaagtactgggattacaggcgtgagtcacagtgcccggccaggccagtaattcttaaggaggccaatatgtttcacttaggttgactgatcagaaacaagtggggagaattagcaggagggaacagtgttaagtgtgaaaagggatattcaagtttataatcttacacttggaaaacaaacacacagacagacctatctattgtcttgtagtagaagctacagaaaggaagatgctacaaaatcttggctgggaagacatgaggtaaaataaggttgaaaaatactatatataagaccccagaaatgcagacttaaaaaaatgtttgaagatttaaagagctcagaagacttccaaaattagtaaccagtcccacagcattaaaagggatcttttatgcaaaataaatctgagtactggttcagtcaggaaaaaagcaattctggtaagataaagaaagctgaaacaaaataaaatggaacacagcatcaaacgcaacacaaaaaagggtggggaggcaagattagtgagtggtgacagagatgcagaggtgactaagaggcaattttctctcctgaactctgccagaggcctgtggaagtaacaagaaagtgccccaaacctcacttgccactaatattggctaccatgtgaaataatgtctatatcttcttaaaaacatgggtctagccttccaaagcttctatgaataaatctgaggttaaataattagaagatcttctaagaggaagtagagtacacctcattcttcctgagggtttacatgttagtttagcatcagctgtcacattcaaagaagctgaatcatctaggagcatgtgttttccacgagaaagcattccctgcccttaaacagagatggatgacaggactagtgttctgcagggtgagaaggcaagccacatatttatttttaaataatccatgatcagaaaaagtccttgaggccgggcatggtggctcacatctgtaatcccagcactttgggaggccgaggcgtgagggtcacttgaggccaggagcttgagaccagcctggccaacataatgaaaccctgtctccactaaaaaatacaaaattagctgggcatggtggcatgcacctgtaatcccagctacttgggaggctgaggcaggagaatcgcttgaacccgggagatggaggttgcagtgagccgagatcatgccactgcactccagcctaggagacagagtgacagttagtctccaaaaaaaaaaaaaaaaaaaaaaaaaaaaaaaaaaagtccttgaaaactgtattgtggacacccactggtgcctgttctcaccacccttcattctggaggcacttctgggtcctcttttgggtatcaggtgctgtgctctggacacaggcctgtcctcaaggcactctgctctgtggcttctctcctcacctgccctgttctccaggggttctaaatgtgtcttctgatctgttcttcaccgtcctcccttgttaacggccctccctgcacagacagcatccccatccctgaccctggctatgcctgggtcccttcccacatctccaacagcctcttggtcactccatttggacattctgctgtgccttcaactcaagtggttgccgctgaacctacctgatgtgctgccagagcacctcaacgtccttagcctcggggatgcctctgtctgaggtctatgtcagaagtgtgcccggcatacagccagggctcaggaagtgcacccaggcagtgtattgcagaagtgactatgctcaccctggcaggcccacgggcagttttcaggccaaagctcttgtcccacattcctgggcccaacaatttagtctctcaaaaagtggcagcgatctcctgagactctctcccaggaactgacattctcttctcactgaagctcccttatgggaaatcgatatattcttaaactatgaaggtggtttgagaatatctcccccaacagtactcagcaaggcaatctctccacttagcccagaaaaaatgtcctggaaattcattcacttatacctaaatagatataaatataccttaaaaaatgaaaattaattcctaaaatcataatcagcatgcttttcaaatctcttcctcctcttcttgcattttctggagctaccatttactgagtattatgtgcttgagctaaaacacagtatttaaaatttatcttgtaaaatattatcattattgtcacattatccatttgaaggataaaaagacccaaggctcagagggtttaggaacttggcaagtcacagcaaatgagcagctacgtccaggcagaaccccattctgtctgactcaaggccagactctcagccttgacaacagcttgcttcccttcctctaaatggcatcacatcctttccggctagaactttcagggacataactgagttatcacttcacttccacattctcatctttaaacacttttttgagatgaagttttgctctttgttgcccaggctggagtgcagtggcatgatcttagctcactgcaatgtccacctcccgggttcaagcgattctcctgtctcagcctccgaagtagctgggattacaggtgcctgccaccacgcccggctaatttttgtatttttttagtagagacaaggtttcaccatgttggccacctaggctgggctcaaacccctgatctcatgatccgcccgcctcggcctcccaaagtgccgagattacaggtgtgagccacggtgccaggcctaaaaactttttagttgacacaattgtacatatttataggatacatagtgatatttcaatacatgtgtataatgtgtaatgatcaaatcagggtagctaatatccatcatctcaaagatttatcatttctttgtgttgtgaacattcaaaatccttgcttgtagattttgaaaatatacaccaaattactgttaaccacagtcactctacagtgttacagaacacaggaacttatccttcccatctagctgttattttgtatccattaatcagcctcatcctccgctcaaccccttcccagaactctaataacctctcttatactctctactaatataagctcaatactctctactaatataagcttttttttttttttttttgagacagtctcactctgttgcccaggctggaatgctgcagtatgatcacagttcactgcagcctcaacttccggggctctggaagtgatcctcctacctcagtctgcccagtagctgggactatacgtgtacgccaccaggcctagctaattttttttttttttggtggactgagtctcgctctgttgcccaggctggagtgcagtggcgagatctcggctcactgcaagctccacctcccaggttcacgccattctcctgcctcagcctcccgagtagctgggactacaggtgcctgccaccacgcctggctaattttttttgtatttttagtagagacggggtttcaccatgttagccaggatggtctcgatctcctgacctcgtgatccgcccatcgtggcctccaaaagtgctgggattacaggcatgagccactgcgcccggccaggcccagctaattttttaagaaaaactttttgtggagatggggttttgctatgttgtccaggcttgagcttttcttgttttgttttagctcccacatgagtgagaacatgcagtatttatctttctgtgcctggcttatttcacttaaaataatgtccttcagggtcatacatgttgtagcacatgaaaggatttcattcttttttttttttttttttttgagacagagtcttgctgtgtcgtccaggctggagtgcagtggcatgatctcagctcactgcaacctgacctcaggtgatccacccgcctcggcctcccaaagtgctgggattacagatgtgagtcattgtgcccagcctataggatttcattcatttttatgggaataatattccatatgtatatatacacattttcttcatccattcacctgctgatggacatttagactgattccatatcttggctactgtaaatagcactgcagtaaacatggggtgcaggtatccctttaatatactgatttcctttgcactggataaatacccagtagtagaattgctcagtggtatgacagtgctattttcagttttgtgagaaacctccatactgtttttcattagtacctgtactaatttacattccaaccaacattatataagagttcccctttctctgcatcctcatcaggatttgttatttcttgtctttttgatgatagccattttaactggaaatagataatatctcattgtggttttgatttacatttctctcatgattagtgatgttgagcattttttcatatacttattagccatttatatgtcgtgttttctttctttctttctttctttcttttttttgagacggagtttcactcttgttgcccaggctggagtgcaatggtgtgttctcggctcactgcaacctccgcctcccaggttcgggtgattctcctgcctcagcctcccgagtagctgggattacaggtgtatgctaccacacccagctaattttgtatttttagtagagatggggtttcaccatgttggccaggctggtctcgaagccctgacctcaggcaatctacccacctcggcctcccaacgtgctgggattacaggcatgaaccaccacacccggcctctacttcttcttttgagaaatgtctgttcagatcctttgcccattttaaaatcacattatcattattattttgctgctgaattgagttccttgtatattccggatatacaagtcccttgtaagatgaatagtttgcagatagtttctgcattcaacaggttgtctctttgctctgattgtttcttttgctgtgcagaagctttttagtttgatatcgtctgctttgtctatttttttgttgcctgtgcttttgatgtgctacacatacaatttttgcccagactaatgtcctgaagtgtttcccttatgctctcttctagtagttttatagtttcgggtattatgtttaagtctttaattcatcttgagttgagagatacccagctttctcagcaaattaaagaaggatcctttccccaatgtatgttctttgcacccttatcaaaaatcagttggctataaatatgtggatttatttctgggttctatgttctgttccactggtctatgcatttgtttttacaccaatacaaagctgttctggttactatagctttgtagtatattttgaagtcaagtagtgtaatgactccagcttttttcttttggcttagtattactttggctatttgaagtcttttgtgtttccatatgaattttaggattgcttttttctgtttctatgaggaatgtcattagtattttgaaagagattgcatcgaatctgtagattgctcttggtagtatgatcattttaactgcattaattcttccaatcatgagcatgtgatgtctttccatttttaattgtccccttcaatttcttttatcactgttttataagttttcattgcagagctctttcacctccttggttagatttattcctgggttttttagttttttggggggtagctatcgtaaaagggattgctttctcaatttttctttttttttctgagacagggtctttctctgtcacccaggctggagtgcagtagcgtaatcacagctcactgcagcctcctatgctcaagcgatcttttcacctcagcctccctactagctggggactacaggcatgtgctaccacacctggttaattttttttttttttttttttgcagagatagggtttcaccatgttgcccaggctggtctcaaaactcctaagctcaagcaatgcacccacctcatcctcctaaagtgctgggattacaggcatgaagcatcacacccggctttttcttgattttttaaagctagtttgttactggtgtatagaaacactactgatttttgtatgttgattttgtatcctgtcactttaatgaatttattcatcagttctaaatgtgttttttggtgacgtctttaggtttttctatatagaagatcatgtcatctgaaaagaggaacaatttaacttcctcttttccagtttggatgccctttattgcattctcttgcctgactgctctggctaggactacttccagcactatctgagcaggagtggtcaaagcaggcatccttgtcttcttccagttcttagagaaaaagctttcagctttcccccattcaggatgatttagatgtgagtttgtcacatacggcctttattattttgagatatgttccttctatacctaatttattgaaggtttttattatgaatggatgttgaattttatcaaatgctttttctgcatccatttaggtcatcatatggcttttgtccttcattctgttgatgtggtgtgtctcatttattgattagcgtatgttgaaacatccttgcatccctgcgataaatcacacttcatcatggtttattatcttttgatgtgttgttggattcagtttgttagtatttggttaggattttttgcatctacgttccacaagaatattggctggtagttttctttttttgttgtgtccttgtctggttttggtattagggcaatgctggcctcattggaagagttaggaaaaattcctttgtcttcaatttttttggaacagtttaagaattggtgctagtttttctttactatttgattgattgattgagacagggtcttgctctgtcacccaggctggagtgcagtggtgtgatcttgactcactgcagctttgacctcctgggctcaagtgatcatcttgcttcagccttctacatagttagcaccacaggtaggtaccaccgtgcccaagtaattttttatttatattttttgtagagacagggtctcaccatgttgcccagattggtctcaaacttctggcctcaagtgagcctcctgacttggcctcccaaagcattgggattacaggcacgagccaccacatccagcctagctgtctgttttttaaagatttggcagaattcaagtaataaagccatctggtcctggagttttctttgttgggaggctttttattactgattcaatgttgttacttattattaatctgctcaggttttctatttcttcttggttcaatcttggtggttgtttccaggaatttgtccatttcctctaggtttcctaatttgctggcctatcattatttataatagtctcctacaatgacctttgtatttttgtggtatcagcctcctttttcatttctaatcttatttatttgggtcttctcccttcttttcttgtctagctaaaggcttgtcaatttttttcatcttttcaaaaaaacacaacacttgctgcttttctgtattgtcttttcagttgcaactttatatatttctgctctgatcttttttctttccttttactaattttggatttggtttgtccttgcttttctagttccttgaggtgcaccattaggttatttgacatttttatttttttattttttttgagatggagtttcgctcttgtcacccaggctggagtgcagtgacgcgatctcggctcactacaacctctgcctcccgggttcaagtgattttctgcctcagcctcccgagtagctgggattataggcgtgtgccaccacgcccagctaatttttgtatttttagtagagatggggtttcaccatgttggccaggctggtcttgggtcttgaattcctgacctccctcaggtgatccacctgcctcggcctcccaaagtgctgggattacaggcgtaagccactgcacctagtgatgtttttctttttctatgtaggcatttattgctatgaacttcctttttagtattgtttttactgtatcccacaggttttggttacatcttcatttttttaagggtcagttcaaatgtaacttcatccagaatccttctctaatccatcccctcttccctggaatacccactcttatctctgagcttccagggcttaatggatattctctaccatacattacagctacaatttctcttcctttccagactgtgtgcatccatagggcatgatctgtactgtctccacagctctcctgccagggcccggcatgctctgggtactcagtacacaactgaaaaagtacagtagaggttcctcttcaaagactttcctccccatctaattaggaataaatagtaacttctcttagaagtaaaatttattcaaagacctgtgctaacatttttaaatctctgctagccataataaagaaatcaatgtactttatgttcttagttcccaaaatttagcctgaatctttgccctggcatgcttatactggttcaagcaagcattaggtcatggcctgttcctcttccttatttgaaggtgtttttacctttctcagcattccacaagttacttcctccgtcctttgttctctgcctttgcaactcttttaaaaagttctaagttactagccaatcaggacaaatacaaaacagccaatggaaactggacacagcaataggatggacacgtcaggttataaatgatcctgtctcatttgttcagtgtactctcgtggcaaaactgctggcaagtataccctttctacagaaagtataaaaacggccttgctgaaaaaattaaatttatgttcaagtgctatttctttatggcactgggaaacaagcatttcaaacaacgactataaagataattcatgatgtaagtcaggaggatgttttttcaatatccttgtatatctggtttttagttacacacagaaaaaccaaaagtctcttacactgggagaccaaataaaagtataactgaagtttcaaagaaaaaaaaagacctagaagatggcttaaaaattatcttgacagtttctgaaaaagttgtctgtagaaacataatttacacattctaagctgccacataggaagggtaatgacaaaagttatatctatccaacttgggacaatatacatgaagattttatcactttctaatagttttcttttttcaatttatttttaattgataacatatatatttattatgtataacatattgttttaaaatatgtatacagttggacctttgtatctgggagttctgcatctgcaggttcaaccaaccctggattaaatatattcagaaaaaagaaactcacaataaaaaataacaatccaacaacaataacaacaaacaaacaatatagtatagcaaccatttacatagcatttacattgtagtaggtataacaagtaatctagaggtgatttaaagtacacaggagaatgcgtgtaggttatatgcaaatactgcaccattttatataaggcacttgagcattcctggagttttggcatgggataactgtacattgtgaaattgctaaattgagctaattaacagatgcattacttcacgtatgcatctttttctttgtagcgagaacatttaaaatctattctcttagcaattttcaagaatacagtacgttattaactacaggcaccaggttgtacaacagatctcttgaacttattcctcctaactgatctaatggttttcatagtataaagcttaaaagagtggaaagcttaagttaattactttaaaaagtaattaaccgtataattatacaaagaaggactcagtgtagaacggaggagctgttatctccacattcagatggagaaacaggcatggtggagtagagtgcgctgggacactagtgtaagtcagcagggctggccaggattacaggacaggctggtgcccgggcatgatatgtgccacattgctctgtcaactgacttccacacaggaaacagcattagctatccatctgtccttccacctccttctatgacactgataattaagaagaaagtaccaggattcaagagacttagggctgattctttaacaattaactcatccacccctgaatgccagaggcacaacaaggatttcctctgcttccctttccacaccctggcagtcaggtgacttagctagagagcctcagtcaaggtcactattcagggcaaaaatcacagatgatactctgggccagcactaggtgattcacgtgcaatgccttacaaaggacagggggaaaggatttaaaaaggccaaaaacccaaatgcaaaccaaacccaaatgaaaaaaacaccctaaaacaaaacacgaatcaagggtgacagcctatgagaagctttaatatcaagctactctaatgactgtcttcccatgagataaaaaaccgcaggaaactgtaaagtcatcaatatatgaataacaccactgataggaaaatatttcccatgcgagtctgaatcatgcagtagtgtactttcatggtggcaggtgctgtcatatactgagcaagtcttcaccctttctactcttcttcctatctactgccacagatctccaaggaaagttggagaaatgtctaaaatgcatacacagctgtgtctgggcacaactgctgcatttattagattttcagcaagtcaactatcacacctgtggacatctggtttagttttataaatgtcccctccttatcctggccacctatttctgggacatgctttcactgattctttctgctgttgtttatgcatctgacgagtactgacgagcatcctactctctgtgccagggatgcaaaggcagctcattcacagcccttatccttgaggagttctgctcctaactggaagagtgcattgaagacttccctaatcctctctctgaagctgtgaacagcacttctctttcctgctcctccaggaatactccctagtggccccaggggcacattatactgtgtcctctttccctggagccctgagagtgggaggtacttcttccttcttctttacatttccagtgcccagaatgtttgttaaactgaaaacatgcaggaggattgaacaaacttgtatttactgaatgctcactacgtgccagtcatttcatagacattatttcatgctctctaagcaaggtagacacctaatccttatttttcagttgaagactctgaaaatcagcaagattggctcaatgttaggatgagacaagtatggggcaggattgggccttatgaggaagaactatagtctctctcttcttcttctttttttttttttttttgagacggagtctcaccctgtggcccaggttggagagaagtggcacaatctcggctcactgcaagctccgcttcccgggttcacgccattctcctgcctcagcctcccaagtagctgggactacaggcgtcctccaccacacccggctaatttttgtttgtatttttagtagagacagggttttaccatgttagccaggatggtctcgatctcctgacctcgtgatccgcccgcctcagcctcccaaagtgctgggattacaggtgtgagccaccatgcccggcccatagtctctctttttttttttttttaaaaaatgtatgtatgtatgtatgtatgtatgtatgtatgtatgtatgtatttttgagatagagtctcattctgtcgcccgggctgaagtgcagtggtgccatcttggctcactgcaacctctgcctcctgggttcaagcaattctcctgcctcagaatcctgagtagctgggattacaggcacgggccaccaagcctggttaattctgtgtatttttagtagagatagggtttcaccatattggccaggctggtctcgaactcctgacctcaggtgatctgcctgccttggcctcccacagtgctgggattacaggcatgagacaccacgcccgaccaccatagtctcttttgtgtggcacggaaaagaaggcttcttggaagaggagaaggtgatgctggaaaggcttctcaggagttcacagctgtctaggcagccatggtctggcttgacacagactgatctgccttagtttgttactctcaaactactgcatatactttgattaatgagagtagttagtctcttcacctacctgttggcaagggtagcatctggttcaattttctctgtggcaccaacccttcaacaacaagcatctattgacgctctcagtatgccacacagcacgctactttcgtgcaggttatctgctagtttattagttccaagccagagcctctctaaggtaggaagtctacattatagcaaatgtgtatgaaatgaagaattaatacttacaggtattcacatgctattgagaagggctatataatgcctgattctagaggcctggcttcaggaatagatgggaatgaactgtaattagcatatcaggtgttcacctttctaaacgcttaaaaggttagttcttttaagcatgttaaagaaggttcttgagattggaattatcattcttttacttaacacatcctatctttgagttaagatgcctaccaagtgcccggtctcattatccagagcatttgttaatttaacaggcttggccgggtgtggtggctcacgcctgtaatcttggcactttgggaggccgaggcaggtggactacctgaggtcaggagttcgtgaccagcctggccaatgtggtgaaaccctgtccctactaaaaatacaaaaattagctgggcatggtggcagtaaataaacctaggttctgtgatattattttaattaatcttaatcaaaggttaaaaagaaactaatcttggcaagcctcaaaaaccagtttttttttttttttttttttttttttttttttttgagatggagtttcactcttgttgcccaggctggagtgcaatggcacaatctcggctcaccacaacctccgcctcccaggttcaagcgattctcctgcctcagcctcccgagtagctgggattacaggcaggcgccactacgcccggctcattttgtatttttagtagagacggggtttctccatgttggtcagggtggtctcgaactcccgacgtcaggtgatccggccacctcggtctcccaaagtgttgggattataggcgtaagccaccgcacccggtccaagaaccagtgttaataaacgtacagtagaagtggggtgggggcagggggaagctactgatcacaaacgagaaactaccacacacaaattaattttacagctttgatttagtctctcgggaccccacatctgaagaggggttaggcagcgaagtgtttcggtatggggcttgaggatagtgattttgggattctgagctactgagctcctctgagactctggggcactgctcacttgtaagcacaagggggctttgcttgacggtaatttaggtcaagcttccttgaatttcgatgaggcagctggagtttcttgaaaatattctcagctagattcagaataattctttctcctcttcgcttttgtggggactttatctcaagtgtctgtttctgtctcactggaagacttaatttaggggtccttcagacccctaaattcagttgaggaaatgacttctgctgcaaatagagacctctgctttatttgtcatggagaacaaggaactcaaatgagagatccaaggcatccttgttttcatgcaaatggttctatcagctcaacagaaggaaatgaaaaaaaacataggggccaaaaaaacagagaagaattatctctgcacacagagtatcagctgatctttaacaatgtcttctaagagctccattctaaacattatcagttttccaaatgtaagcgcatgtgagctgagctagctatgggatatcgcacacttcaaatcccttataaaagtcatgagaaggctgtactccctatgtctcaccagcagacaggccaaatctctgaatttgatgtcctgctgtgaacagccatgaagaacactcttggtttttgtagggaggatttctattttcaattatgggctttttttgggggaagtggggaaagtactgtatccttagatgaccacggttgctgtggccaagtctcaaacacttgtttcagcagctggaacactaaataaatttagtctttgtcttctgggtctttggtaaagagctagttagaatttattcaagacatgagagatatgcctggcacaaagtcagacagtatatattatgggtttctgttgtcccccttgagataaaattacagaagggggtggagggaaatgagggggtctcttggcccccaggactctggtgtcattttctcctataaaccattttcaggactctcaatgacctagaggctctctgaacaggcataggctgtgcctgtctagataggtccccactgctatgttggtaaccacactcaggagatgtgaaatctttcagtcactttttccattattgtattcagtctggaggcttctcacagtcctctgtagggtgcagaaagagaatctctgctctctgtcagactgctaccctgatggggaatgccattacccacagggaagcagcaacacagcattcttacactacagacctgcagcttgatatgtgagtgatttaaaaacatacattttagtacaatgtatggaatggtaagaaaacactggtgggttagacctttggcttacatgcactattactgtgtggccactggttatctttgaggatagctgttcatgccaaagcgttattttaacttttctctattactttatgatctatgaggccatttggggtctctctaagaacacagctcccatttataacactatttcaatagagaataagctctgaaaaaacactgttttgaataaagctcacatttcccagaaaatagccctagtgtgattcaaataggcatggcattgtgtagcgagaagccatgaaacctgtgggagcacgagctgagcacacagggagaaccctgcatttggattcactggcaaagaccaaacttgaagctatagctctgggtacctctcaattatccctactggctgaggcaacactttaatggtagcctgaggcgccagccctgtgagacatttgacaactcacagcacaacaaccctcctatgagcgggattcctcgtctgggcgcagtggctcaagcctgtagtcccagcaccttgaggggtcaaggtgggaggatcagttgagtacaggaattcaagaccagcctgggcaacatagcaagacctcatctctaccaaaaaaaaaaaaaaaaaaaaaaaaaagctgggcatggtgccacacacctgtggttccagctacttggaaggctgaggtgggaggatcaggatcacttgagccccggagatggaggcgactgagaaaggcctgtctcaagggaaaaaaaaaattcctctccaagtactgtctctggaaaaatgttccttattagagagtacaagagaatgggctttggtcacacagaacctgggttagaatcccaggctgagaactacaggccaattactcagtatctctgaacaaatcccctaattcacatgatgccagtaactgcataatagcacctacctcattttgagatgattacaaaagaagtactaggcgtagagcctctcataaggcaagtgctccataactattaactaccactattattactagcgtcttcaaaagagtggcattttaatgtagagaaaagtaactttccagagaactgaaactccactccacattataaaaagtacaggttctggagccacgtggacctcagattgaatctcaactttacctcttaccagtggtgtgaccttgggctggtcagtgtatctcattgagccttagtttcctcttctgtaaaatgggcacaaaagcacatacttcacaggattgttgtaaggttaacacaaataatgcacaaagagagcccacagcactgcctgtcctgctcttggtacctggcaaatggcatggtccctatttcaagctgctcctgacaacacgatccgcgccactcaaatgtaccttgcaattcttacctcaaagctggctagactatcagctctgaggatggagtcacaagcccttcgaggatggagtcacaagcccttctcaaagcccatacctttcccggcgttcctaggaggcagagggggagcctccgtggttggtgatgtgggcgagtctgtgcttgtggaaacgaagatctggttggtgaaggctccataggagagccgctgtttgtcccttggagtgctgaatcctggcagtgccagcttgtcctggggggagatgctggaggagtggcagaagctctgaggtctgggtgagcgctctttcttgatagggcttggctggcagatgaaataagaaggtgagataataatcaaggaccacccttcatgtgtacagagggcctccgcagggcgggctcaggtgggaatctgggttcctgtggctctctgagctttatgaggtcagccacaatgagcctcatgatgctgacacagtacaagggaaggatctagataccacactttcatatcgttcaccactatgaataatcacactagtgaaacactggttaggatcagcagcagtgtcagaagcacagtaaggtcacaggtagatttaacttttaataagcaaacaccttcagaatgcaggactttttcagcaacatttgaatagtatttccacctatttctaatttgctacattaagttttgttccctgctcaaccctttaacgttgaagttctttctttgcctcttttctcattttatatccccctgcaaagtaaacggattcacacccactgcccgctacacaataattacttacagatctgtaaatacaaccccagtgacttgtgttccaaaccaatggcccatgaggtatctctggtatttgcgcttgtggtgatggcattaggatccactcaactgcccaggttagaaacctcagtgtcacctggagtccctggttcctgcattccccttggaaatatcccttgaagcccctcctagtacaggtgctcaccagctcccactgcagctctagcctccagaatggccccttctccagtttccttcctccagtccattctccacactgcagccagagctggtgggaaaccttgctctttagacaataaacctctgtgggcttctgactgcttgcacaaaaacccaaaggccaaaccttgcccacaaagccatcctgatctggtttgcctgactctacaaggcagctgcctgcctctccccacccagccaggtgaatgcatctcacacacagtgcttctctccattcctccgacatccagactctaccatgactccttcccttggcacgtggtgttctggaatgatgcattccaccccacttctttccctggcaagcttccacctatccttagaaacccatctccaatgtccttgagaaggcagactgaggcagctgcttggtcctctgaatagctctcaggaatttttccatactcttataatgattatcacattgtattataatttatttcctcttaaagttgttaaggcttgaggacctctttggccattccttacatcctgcctgtgatacaggaaatgtccaatacataggcaatcaattaatgcatgaatgaactttcagaggtagttaactgcttataaggaaaactcagtgagaactgggtttaatcctccaaactgtctttactagctgggagactttagacaagttgctaaattctctttgtaagttttctcttctgtaaaatggggataacaatgtcccttatgtacttttttttttttttcctctgagacagggtctcactcagacacccacacccaggctggagtgcaatgggacaatcttggctcatcacagccttgagttcctgggctcaggtgattctcccacctctgcctcccgggcagctgggaccacaggcgcacaccaccacggccagctaatttttgtattttttgtagagagagggtttcgccatgttgcccaggctggtctcaagcttctgggctcaaggcatccacccgtctcaccctcccaaagtgctgggattacaggtgtgagccacagcactcagttatggactttcaataaagatgatctgagataacgtaagtgcttaaatctgtctaatccatatttaatgaacatcattccttaatgacaggcatacattctgagaaatgtgttaggtgatttcgttcttgtgcgaacatcatagagtatacttacacaaacctagatgggagagcctactacacacctaggctatatggtatagcctattgctcccaggctacaaacctgtacagcatgctactatactaaacattgtaaacaactgtaacacaatggtaattacttgtgtatctaaacatagaagaggtaaaataaaaacatgttatataagattaaaaaatggtacatctatgtaggacactttccataaatggagctggaaggactggaagctgctctgggtgtgagtgaaggcctaggacattactgtacatttttatacaactcagtgcagtaggttggtttataccagcatcccacaaccatttgaggaatgtgttgcactaccgtattatgacatctatggcatcactaggtgatggctatttttcagctccgttttaatcttatattgatccccattgagtatgcagtgtgttgtggactgaaatgttattatacagtgcatgattatgttcaataaataacaactgttatttacttactaattacttgttttgaaggttaattttttttttttttttttttaagatatagggtcttgctctgtcattcaggtcaagagtgcagtagtacaatcatagctcactgcagcctcaaactcctgggctcaagcaatcctcctgcctcagcttgtcaaatagcaccaccacgttttattgattgatccatttactttgtagagacagggtctcaccattttgcttaggttgctctcgaattcctggtctcaagcgatagttctgccttggcctcccaaagcgctgggattataggcatgagccaccatgcctagcttcatggttaattttatgtgtcaacaggctacagtgtcctggtgtttggtcaaatactagtctagatgttgctgtaaaggaattttttagatgcaattaccatttaaatgagtagatttcgagtcaagggaactacccttcatgatgtgggtgtgcctcacctaatcagccaaagaaaggccttaaaaagactgaggtcccccaaagggtaaggaatgctgcctccagactgtctttagcctgaagactgcaacattaactcctgctgggatttccagcctgctggcctgccctgtgcattttgaacttgacagctccttcaatcatgtgagccaattccttaaaaaaaatttctctgtctctctccctatcctgttggctctgtttctctggacaaccttaatatagctgttaaatggtgcccaataaggactgaacaacataaatggccctgatacattggatcataaaaccacaatcaatcaatctcaccaaaaatggatcttgtctacacagactagaaaagttggggtagttgttgagaattcgaggacataatttacactcactttgtcatccagatcatcatcgctctcatctatctcctcctgtcgaagattccactcatattctacgtggacgtgtggattgaactttccagatttagcctgggaaagctggaaggaacagcaaatgtgcaccattttaatttaaatgctgaaacatcccaatattatacaaacactgagcaaatcccaccttattcctagttttcaatgaatcatctgtaggtgtactataggcaacactctgcttagacaagctgcactgctatgtgacaggctcaagaagaaatgcaaacaattgcaggcagagccttctttattttgatgacttgtctccaaaattaaaagctttcttcttattaaatgggcctcaaacttgcaaattcctggctgaaaggcaaaacgagtctttgaagtttaagacgtaggcttttaaggtcccagtccaatctgtggccccattttctcattcataaaatgggagcagggataattgtctcaaaggattcttttaagaataaaaaggcccaactggtgggcctggaacctggcacttagcagaaactcaagagaatcacactaatgtgaaggccctgacttgctaagcaagaactagtagggtcaaaaaaggtgaatgtgcacaggaaggggaggggctgggagaacagtgtgttaacattttgaagaccactactctctgagctttacttgcccaatttttggagcagcttctcaaataattctttactattaagctgcagagaaagtctaatggtctgggaaataaaaagcatgacctcaatgcacaagtcgatctggtaataatacttgtgtaatgcctttcacctcctttaactgcattccaaaaacatgtggatgacaaatttatcattttaccactttttctaatgtagcacattgctcatctgattttctttagcaagtgttaaaaaaaaatgaatctgcatttttaatattcaattctagcttctcagaatgacacttttaaggcagccaatgtctaataaatctcccacgtccatttttgcttaccagatcttcacactgggtagcttttagtctctttgctatgtctagggcagtttctccagcctggttaactgaaataggaaaaaaattaatttgcataattatctaggaaacaccttaagaaggcaaggaacaataatcaaattacaatgtaccatgcaacacacgcttactacagtcatgaagacactagacacactcttacctatatccacagtgggcttgctcctgagcaaaagcttcaaacactcaggtttactgtacatactacagtagtgtagaactgtgtttcccagggccgtctgcttatccaggttcccactgaaaaattagatgatgattagaaaaaaatgacttactttataacttaaaactatagattagccacttatttttgtgctgacaactgagtcaaatttgagacctaattattataatagagaaaattatgatgtttctaacctagatttataagcaatacagtgataacaggcagtatttatttagagtgccaggtcctatgggacagacactgtttcttaacatttacatgtattagttcattgaatctttacaactatatgatggggtaaatactaataataaccgcttttacagataaaaaaccctgaagcgcagagaggctgaagtgcttgctttcaagattttcaagatagggatggtgaagcagggatatttgaacacaggtaatctatctctggagccaatgttttgagccactatgctatattgtctctgaggaagaaacctggacttttatacaatttggcttgtgtctatgtaccatttttcctctatgggttcaaatcccctcactattttgatcttcttctttagatgagctctagttcctcctcatcatctgttgcttacagaacagataaagagaataaagaatccagcaagtccaaacttcctatattcactcttatacttccatcagtatatcccaaacttgaatgagctattgatccagccacacacactgctgctgtcttatattaaatttaggaacaatgaaaactcacaaatatggttgacctgtgctgttaagtcttctctcttttaacctctcctaacggttagcaaatgtgtccaatctgtgcagcagatttttggatacagacataattttacatttataaaggccaagagatggcaaactacagcctgtaggccatatctggttcactgtctgtttttataaacaaaataataaagtttcattggaatacagccacacttgcttgtttacacattgtcagtggctgctttcacactaccatggcagaagtgaatagctctgacagagagacttcatgcctgcaaagccaaaaataatttttatatctagcatgacacagaaaaagcttgccaattcccgatctaggccactgataggactggtttgtgttaatttataaggcatattcaggtaattcaacagagaaaacaaaaacgataccagttttgtacaaggaagtcaaccaaatggagagatgtctgatctgcagttcggacggcaaggtgaagggctgtctccccaagctcctaaaaagggaaagaaaagtataagtaagtcaataatatgctctgccaagggaggcttcatatatatcagttgcccccaagtaattataaggagcacacctcttcactctcatattctcttgatttagacatggccacccaatgtataagaatctcattatatggtataatgttaaaataagtcaccttttaaactgattttccacattactttttatccaatgattttagtgaggccttacctgcccaggttccagcagtggttccattagctctaccccttctgcatagacttgaattagtgcaagtaaatccctggatttgatggcctcaagcaattcatttagtttagctgatgaagttgaacaggtcttccttgaaaacctatgatctacatactttgcagtgatatattcttttcgtacagtcctaaaacagaacaaaataaagaatttttattttccaagtgctaggaaaggtttacatttttctgacaaacatttctctttgagaagttattttaattaagatacgcttcttttcaccattcaaataaaccaggttttagaccaaattactccaacagagacagaataaagaaaataatatatgtttactaatatatacaagtaatagatatagttacaaagtaaacgggcacataaatcacagatttctttttcaccttgaccaacagcatgagaaatcaactatttataaatacttcaaactctgatatataagcatatgaataaatttaaaaatttaagaagttaaacacattctgaaagaccaattaaaagttttcagagcttcacggaaaggattttggtcgtctgatataactctctattttttatttattttgtaaaatttttaaaaggatcgggtctcgctatgttgcccaggctggtcttgaactcctgagctcaagcaattctcctgccttggcctcccaaagagttgggattacaggtgtgagccggcctgtacccggccataactctctattttataggtgaggaaactaaggctcagaaaggctgtcactgaagcaactcccccaggccaggcattgagctccaaaggggtgaagatgagctgtctttcctgcacaggttcagtatgggagcaggagaccacatggataacatgcccaaagtctgaaagggtgtagtactttttccttttcttgaggaattgccttctttacttccgttcaagtgtttctggtgggactgagctcacctcccagccacaggggtgagtaaatgacctaagtggcccaatggtcaccttggccacctctggggaaagactaaaatggaagtcagctcagaggaaaggagaggtaggagtcaaggaaagagagctagggtccacgtgatgctgtctgacagcctggatccagctgtacctgaatccaccccttgaatttcccagttacatgagctaattaataaagacagtaaatgaactttggattaaatcttttagttctacagcaccccagctgtgtgaccatagtaaactgcttaatcgtcatgagcttcagttttttttttttaatctgaaaatggggataagacattggtatattttgaattaaaggatgtacagtgcctaagaagtgttttcttccttctgagagggctctaacacaaaggacataaactttcttgctcaaaaatatgcattccacctgtggaagctgctactgtttccaacagcccacagtcaggcaacacagtttaacactgtgctggtacctttttctttcattttgggttggcagtaaaaacagttgagctggttgatgatggcacacagcctctggtcttttctcaaccctgtgcagttgagaagagaccaactgattctactaagtaaccaaaatcttatgctcacgtgtgtcccttatgcttaggtcaaagtcctttttaggatggctagagcctgatgaattagaggacttccagtaaccaaaagaacggcccaagcctggcttctgaggcctctgctgcatgtgtcttatataaagtgtgaaaggcagctactgtgttgatggatggagcagcagacttaaaaattaaatcgctcgattcaagtctgagaccacgtgctaactatgtgaccctgggtaaatcaagttctcactgaatctcagtttctttacctgtaaaatattagtaatcatagctgccttccaaggaagcaagattatgggtaaggaacaaagagggatgcacatgttaggggttcatttgaaagcttccttcccattattatccgggaggccagaactaggcttaaagatgcaaagttgcggggaggtagatcttagattactgtttccatgcattcatctgcgtttcaggaatgtctgcaggtggcttcctgtcactggaaatatcatgcagatgccacgcaattatttggaagcaatgatgcagagggtgctcaggtatcacatgatcaccttgaaaatcacctctacccttaggtctctaattctgtggccataggaagtatctggcctcttactaggcacaatgccttcaactttttatgggcactcagcccatagtcccctggcaatttaatgttttctgacactggagtaatagggagagtggaaaatagatttgtctggaaatctggacactagaattctagtcctatggctgataaagacaacttttctcctctgtccccttaaacccagtcctctctttatctgctccgtttttgttaatgctactatctatttacctagatgtaaaaccttgggtgtcatcttgactgagtcttaaacatctcatattaaaactgatcagcaaatcctgttggctctcccttcaaaatacattgggaagtcaaccacatttcattatcttcattgctaccacctttgtccagtttaccttcagcgctcagtggatctattctaacagcttctcctctgtctgttttcataggcacccaggccccgccacactccccgccagtctgtccttcacacgtcagctacagctgggtttctcaacctcagccctactgacatttggggctgggtacattcttttctcttgacagctgtcctatgtttagcaccatccctgacctctacccactgggtgacagtagcacctgtccaagtcatgacaactgagtatctccagacattgccaagtatcctctgggggcaaagtcacccttggttgagaaccaatatcatatgatcagtttaagaggctgggtgcagtggctcatgcctgtaatcccagcacactgggaggccgaggtgggtgaatcacctgaggtcgggagtttgagaccagcctgatcaacatggagaaaactccttctctactaaaaatacaaaaaactagtcgggcatagtggcgcatgcctgtaatcccagctattcgggaggctgcgacaggagaatcacttgaacccgggaggtggaggttgcagtgagcaaagatcgcatcactgcactccagcctaggctatgagagtgaaattccatctcaaaaaaaaaaaaaaaaaaaaaaaaaaaagaacatacgatcaatttagaaaataactcagatcacgccactcctgtttaaaacctctcaatcacacttacaatcaaatccccaggcagtccatgacctacacgatctggctccacctctatcttgcccagcattcccctgcatctccctcttgctcagttctctcccgccacatcttccttcatgacatagctcaaatatgccttactgccccttggggcacccatatgacctgttccagctgcctggctgcttccccccagggagggtgccttcatgcccctcaattctgcactttccccaccttcaacttgaaaaaaataccctctccccattccccacacacttcaacacctcctcttgttgtaatttcttcataacacctaatacaatgtgtaattgtatgactgactttttaattccctgtgttttcatctcctcagaatgtaagcaggacagaaactctgtcttgtttgctactgtatcttcagcacctacaagactggctgaagtagggaagctgcctcgtaaggatttgatcaacaactaaatgagtgatcaaactgcatgttacaagaggttcactttatgcttctgggtcactggccaaacaaggaagtaataatagtagtagtagtaaatacttatacagcacttactacagaccaataataataataacagatacttatacagcactaactatagaccaaatgctgctccaagcactttttattcaagccccttaattgtcaccacaaccctatgaggtagatatatgttctggatgaggaaactaaggcacagacaattaaagttacttgtccaaggtcacatagtttaggaagtggcagagctatgatatgaactccagcagtctggcttcaaaatctatgaccctaaccactacattagagatattggagaatcacagacattttgaaggtgaaagtcttacagaggccaaatgactagatgaggcacaaagctgaccaggtggcgctgatgctgcttcccacatgagaaacaggacataaaaacccatgttgttatgacattcatctggcagctgtgccttcaaggtttgggtcatgcaaacatttaaaaaatgctggtgtggacaagagtgcactgtgtatgtgcttgagcacttgctgttatcaagctggtaaagtaaaacttaggtcttatttgttcatggtagttttacaatcaaattaacttttgaaaagccttttcagtgtaatttgtgctttttttttccatctgcatagtgttctgttgtgtggctctaccatagagtatttcatcagatgcctacagatggatacttgttttgttcctaatctttttgcattacagaataggaataaattcccaggagtgggactgctgagtcaaagggtaagtacatttataattttggtaaatatggttaatttgtttttcatagtgtaccattttgtactcccactggcaatattatgagacagaatgtcagtttccccacagtcttgctgagtgggtttttaagcatttggatttttgccaggctaaaaggaatctcccattgtctttgaatgtctcttactcatcacaatatgccatgtttttgagagaactgcccccatgacaatctgtgcttcacagagcaggtgcgcagctgcaacaacctaggggaaggtgagggtgaaaagaatctgtgcatcccggaaatacatttctaaatacttttctttgttctgctttcccctgacaatggggtttgctctggaaaacaaacaaacaaacaaacaaacactgtaaaaaactaaagactttcttttatttttgagatggggtctcgcactgttgcccaggctggagtgcaggggtgcgatctcggctcactgcaagctccgcctcccgggttcatgccattctcctgcctcagcctcccgagtagctgggactacaaagtgcctgccaccacgcccggctaatttttaaaaaatttttaatagagacgggtttcaccgtgttagccaggatggtcttgatctcctgacctcgtgatccgtttgcctcagcctcccaaagtgctgggattacaggcgtgagccactgcacccagccaaaaaaaaaaaaagaagttttttggaagggtagaaaaacaattatagaatggtttaaaaaagttcaatatatcagaaatacttacatatcacttgaaggggtgggttttggtgaggggctgggtaaatttgcttccataatatcattaaaactattgtttcctacattcttggccagctgtaacagaaaaaacaaacaaccacaatatagcaaactctttgctactagttaaaagtctcctattatttgtttttgagatttatgaatatgtattttccctcatttgacttagaatacaaaccaccgtccatctggtctacaaatatttactgagcatctactacgtgccaagcaccaaactaagtgctggaaatacagagatgggtaaactatgttccctttccatagatgctcatagtctagtggggccattgacaaggaaatcaatcatgtctacaaatatgtgataaatgctagaacagaatctggttctacacacatataaactatatgagattacagagagcaggctccatatgtgagtctaggttaaacttttaataaacagcaatagcttatcaaccaccatcatgtttcctttttatattgaacaaatttactcccaggacagaaaaggacacaggattactttatatctggatacagattaagatgctgcaggcagcagaggacccaggaaccattttgcttctgggttcaagagcattctaagaaaatttgttctgaagggcctctaatcattttatgtaattttgggatgcaaagtttaagaaacatacatgcaaccatgtctttgagggaaaaagtcttgggtttattgcatggcaaacgtttaggatttggactttcctctttcttgttgtcaaactgggtttcattaatacaggtcaaggagatgagggacatcatttctgcactaaagaatgtgttacaggtaataggtctgtgtcttttctctacaatcctgaagtgaactagggagccgagtatcagcatggtaacttcctacattctaaattagaaggaatgtcttgtattgtgcatagaacacaagacagatcacgattgcttagtgaacgctcagatgaccagggctgctggctgggtcactaactgccctttttggttaaggctaatgataagctagactttcagcttttttttgagcccaggttcattcaggttctgctcaagggtgagcctcctgtctgagaagtcatactttattttaaaaatttcactcttagtacaaagactctctcacagtgcaccaggtgttaaaattatgcaaaatggggcatttgtccagtaggcatcctacttgggggatgccaagtaggctccccttctgtattttggtatatctcggggagcaatttggacctgatgacaactccaaatctgggtgactcatgatgggaagggcagaggttaaaggaaaacaagtttaagtgtacataaccccttttttggattaagaagctaagcaccacaacttctcacaatttcttcccttactacctaaagaagttatgggttcaagagtagttggttttatgacaatagttaacaagccacttgtaattcatgtgtacttttacaaacttagaaataataaaaaaaaattgagataaactctttagtcattatttacaacagaagccatgaggtaatgtgaacatttgagtttaactgctatttccacgagttatatgaaaactaattcataaagaaaaatgtagttttgaagaagaccatcccaaaagaaaagagccaatttcactgagctacttatagacatgtatgattcatcctttcttcaaacaggaaatagaaagtcagcattacataccacaaaagttacattttaaacgtctacgcaaactcacaaaattcaggaattataattctttgtactcagcagacatacaaaaaaaatccaaaacaatatattaaaattactcatgacaataatatcattcttcccaagtacaggtcactacttaccaagagttcagaagttcctaatttgtctagttccaaagactgaatgcgagaaatatgaacccccatttccctatggatgccagaacattctatacaggtcaaaatacccaagttggttgaaagccaggtgggttctgtggaaagaatgttgaagacaatgaaacaaaaaagacatctaattttagtgtgccaactacagaggaagctaaaacagtagtacaaattgttaagaactatgaagaaaagacttaaatggaagaaatggactcttgaggtttagcctaggggctaccataaaagtttccctttgatactgaactgaaaacaaaattaagcactttatccttgtgaaaaagtgagaaaggctttccttaagagaccctatgcaacacctctaggcctgtgagagatgttccctcactgccactatcacctctgacagtgatggactgaaggtctattaagtactgctcacaggggagtggattctatagccatcattaacctccaagttgcaactaacattaacctcaacagttcttggtcatggcctccccatgagcacttcttagtaataagacagctgtaaatattgaacaccaaatgtttctttcagtgacctaaggccttttttctacaacctccaatggccctagaacaatgggaactattacttccatgttagccaaatcttcaggtttctctctctgggtcaagcttcttcctgactggtcaatgcttgagattttactacctgcttgccatttcctgacactacgtgtgtcactatcatacatgtacacaataatggcagaaaatctgagacttctctctgaggtgcttatggcttcttgtgtagaaaatccagtttcacaagtaaaaccgcaaaaaaggtatatcacagtgcttaagaataccaggtttgcatccttgttctgactcctactagctgtgtgaccttatgcaagtcattcaacctctctgagtcccagtttcctcatctgtaaaatgagaacattgggatcttgctcacaggggttctgcaaggattcactgagataagcaaaacacctagcatgattctcagtacagcgggaacactcagtgttagctgttgccaatacactggtaatatagtgctatttgaaaataaaagtttgggagaaggcgacttcaatgtgatacagaggtgagggaaggtgtggctgagtaggaaggaaggaaaatcatgtaccacatgtcagttgatttcacatgcaccatttcttttttcttttttttgagacagtctcgctctgtcgcccaggctagagtgcaatggtgcaatcttggctcactgcaacctctgcctcctgggttcaaatgattcttctgccttatcctcccaagtagctgggattacaggtgcccgccacctcgcccagctagtttttgtatttttaatagagatggggtttcaccatgttggccaggctggtctcgaactcctgacctcaagtgatccgcccgcctcagcctcccaaagtgctgggattacaggcgtgagccaccgtgccatagcaagaggtttactgacccattttttaggataagtaaactacgaatcagaatactaaagggactcagtgtgagatggtccaggctgggagtggtggacagtgatacaaaatgtggaccccatgccccctactctctccataatgtccatggtgcttatatacctggaccttataggaaaggtagtattttggcagtgacacctaggagagcaagagggggctttccaggtagagaaaacagcataggtaaaagcagctcagcggtaggaaaaatcacgttgggaatacgtgttttgtgtgtgtatgtgagtgtgtccataggggttaaggtttttcaataactagatcgttttatattctacaggaagagaaaggatgttgtaaaagctcgttcaaatatggggacaaaaacctgatgagccacaatcgcagcaaatgtcattccctgggagccgctggacatcctcaataatggcttttgtcaggtcttccaggctgttctctcccgcactctgctctccacggaaggccatggttagggcctcttctttgctatttgtcaatactgatatccatctgttggtaaaaacataagaggaaaaaagtctttataagagcatggtcatttttttttttttttttttttttttgccactgcaaaaaaaaaaaatctacttttgtcaagtaattccaaaagagaagcccccttccaaaatagcaataaagtgaggaaaaacaaagaaatcaaacttgaaggaaggtgagagttaaagaatgaaaaatgacacataggggaaaatgagagagaggagaggagcagatgagaaaagtaaaaaatcaatataactgaggacttgaacgaatatacaaggagactgcatttccgtgtgggcatactgaataaagggaatgttggaatggagaggactcaatgagggacccatccaatgcaaggatgagaaagaaatgatgagaaatggagaggagccaggaaaaggagtttagcaaaaggtatgtattttctgcaagtccatgtcagtggggacacttaacagtgaaaatgaagggatatttcattagcagccataaaaatttatacttatgaaaaaggcatattaacatggaaacatgatgacatttataatattaaatgaagactgcagatttacttatatacagtatgactactgtatgtcccaaacaaaataaccctttgctactaaaataacctagaaacccaacaacagagagttgattaactaggcctgaaataaccacaaagtagaacagttaagcaggcattaaagtgtacattttcaaataatttttgggtgacattggataaatgctcataatatagtgttttgtgaaatcaacaacaaaaaaacctattatatgattgatatggtttggatttgtgtcctcacccaaatctcatcttgaattgttatccccataatccccacgtgtctggggagagacccgtgtaggaggtgattggatcaaggtggcggtttcccccatgctgttctcatgatagtgagtgagttgagatctgatggttttataaggggctcttccctctttgctccacacacttctctctcctgctgccatgtgaagaaagacatgtttgctgcccttccaccataattgtaagtctcctgaggcctccccagccatgtggaactgtgagtcaattaaacttctttcctttataaattacccagtctacagtatttccttatagcagtgtgagaacgggctaatagaatgatataatcccaaatttaaatatatgtatgtaataaaggctaaaaggaatttcacaaatacgtcaatagtggttgtctctgagtgattttctatagaaaacaactgatagaggaattgcccgactttgtgcctttctataatttttcaaaactataatgaacttgtattactttcatgaatgagaaaaaagccaaatttattttctaaaaagaaaataaaaaacatttccaaaccagtgttaattttttgttactatatagacagctaatgtttattctcaacagacaatacagaggttcagaactgagtctctcatttttttgtatatcgttgaatgaaatggatatgaaacaaagcactatacaaaagactttgaataagcaatagtgacagcataagaattaaaaaccaaattatgtttttggagtatgtgaactatgcaagtcacacctttgactctaggtggcgctcaccttcagtatgttgggagaaacgcatatacacagcttaacttctgtgatgcagaaaactgaacatttcaaaaccaagagtctaggaattcatatgcagaaggaatggggggattttataccttttagaagattaaaacagtattttttatatcagtctgaagttagaaactagaaattgttttgttaaaaacaaatcaagaacctgggttcaacaggactgattactgcattttatcagcggcactgatgttactggatttttcacttgactgcaaagcctctatttcgctttcctcaggcattctagcatttggctaatattggccagtatctactatgtaccaaatacttacaatttttaacatatagattgaacaccccaaatttgaaatccaaaaaagttgtgggcccaagcatttcaaataagggatactcaacctgtagaatcttctcacatgcctctaagttagggtttataatactttatagatgaggaaactgaagttatatgacttgcctaaggttctaggctggattctgtcagaccagatggggataagaaaacacttttgttgactcactttttcagagttccttccatttgcctctttactcaggagctcatgacaaataaataaagaagtttgtcatgataatcagaaaaagtatatttaaaggataattttctagagaaaataattcaaatttggtggaatgaaatggctaaatttcaaaaggaccaagactcacagtgatcatttgtgacattaacttttaaattattttcaagtaacaagcatactcaaaagcataaagaatgcataattgtattttaatactttaaacgtcgctttgagttttataagataaaaaataacttggcactgtgctaagggctttacatagcttatcctctcaaaatcctgcaatcgaggtatataatcccatcttactgatgagaagactgaagccagatgatctgcctaaggttaaaaagccactaaccaccatagtgcacgtatgtagtcccagctactggggaggctgaagcgggaagatcgctctagcctaggagttcaagtccagcctgggcaacatagatctcattttaaaaaaaaaagccacgctcacgcctgtaagcccagcactttgggaggccaaggcgggcaaatcacgaggtcaggagatcgagaccatcctggctaacacggtgaaaccccatctctactaaaaacacaaaaaaattagccaggcgtggtggcacgcgcctgtagttccaggtactcgcgaggctgaggcagcagaattgcttgaacccgggaggcataggttgcagtgagccgagatcgcgccactgcactccagcctgggcgacagagcaagactctgaaaacaaacaaacaaacaaacaaacaaacaaacaaacaaaaaagccactagccagcagagcctggacaagaagccaaatgagtctaacatgcatctgctctttgtgaactttcctcagtgagaagaaattttttcattcaatttcatcgaacactttcatatgaaaaataaactcaatgatgcagtgaaactgcctctatgtaacctggaggtaagtgaagaactaaggcttccctctgaggcatgtgctttctttgtggactgccattacctcctacagcactcaaaacaaagttcccctctcaccaccagcacccagagagaatgcaggctgggcactatagctcacgcctgtaatcccagcactttctggggtcgaggtgggaggatggcttgagctcaggagtttgaggccagcctgggtaacaacagcaagacctcatggctactgaaaaaaaaaaaaaaaaaaaaaaaaaaagaaatgaaaattagctgggcgtggtgatgcgtgcttatagcactagctacttgcaaggctgcgacaggaggatcacctgagcctgggagactgaggactgaggctgcaagtgagctataatcacgccactgcactccagcatgtgtgacagagtgagaccttgtctcagaaacaaaacaaaactgcaaagtgcaaaatgcgcaacttcagggtgggccatgtaattcttttactgaaaaatgttaagtctcacgggcaggacaccaatctcttaacaaaactgggactgaattacctgtaagttctaagagtaaataaaatattgaagatctgagtttgagtcataagggaacaaacagaaagtggttgtgttccctgcctcacccaaattactcacctgtgtttcacttagggttttgagaaagggaaatgaggaagagagaatgaaatcggagaaggagaaacaatattccaaggtgactgtggaattctatctgggttcaaatcctagcttactaggactgttaccatgggcacattgtgcctctgtttcctcatttgcaaactagggacaaaagtccctactttctggggttgtgaggattaataagacatgaagtgcatttagcacgtaacatctcaataactattacccatttttattataaatagtacctctctgaacctgtgggtggagggccaggcctctgacttcctcctcattgacttctagtcacctttcagtctaccaactctatacccataacaacaagtcatcaatcacttccttcctattccatcctcctgtttctgtgccatcagagcctcctgcctggagtatagagtatttacaaccttcccctacgttcctgagccagctcagccttaccttcctcttggaagtcatctctgaggaacaaccccaggaaaccatgagggtgtgtgccccgagtctattcctccagcacatggcctcctctgtccttacacttagcacctgcaccatgtcgtaccaacagcctcctgcagtagagatgcagttccttcagggcaggggctccatctaatttaatgttgtattctcaaggctttgcatagccttggcatacagctggcattcattaaatattcaaataatgaatagctaattagacctttctcatccttttcctttgtctttctaccttctctctcagttttctttccccaccctgttcctcccacctctgtatcttttctacccatgttctcttctctttctgatcctttatcatttctcctttgaaatgggaaaagagtaaaattccccagagaagattgtgtgtgtgagcaataacaaaagtaagcgagtgggagagagaaaagaagtgagtataaggcaaaaagggtatgagcagaattctgtggctctccagaaataagagaggaacatagcatgtattctgtgccactgatgggacaggaagtttgacagtttataaaactcggtccaaattaccccaagtactcattagaaataaaaaaaaaaaaagtgaacaataattgcccattttaacaaaaacatccctctcccaagcagctgagatttataatagtcacacactgcctttttccgtctagacaggctacaggaaagaagagggaataaagacagctcaggaccagggctagcattttaaaaaagggactagggactatctaaggttgcatacctggtcaggtgagtgcaaaactccaacccaggggccgggcgcggtggctcacgcctgtaatcccagcactttgggaggccgaggcgggtggatcatgaggtcaggagatcgagaccatcctggctaacaaggtgaaaccccgtctctactaaaaatacaaaaaattagccgggcgcggtggcgggcgcctgtagtcccagctactcgggaggctgaggcaggagaatggcgtgaacccgggaagcggagcttgcagtgagccgagattgcgccactgcagtccgcagtccggcctgggcgacagagcgagactccgtctcaaaaacaaacaaacaaacaaacaaacaaaaaaaaaaacaaaaaactccaacccaggagtatgtgataccaacctgttcctttccactatatcacgctcccttttattgactctgttcaccccagtgaaaggcacatggcagtttccttccttcagggcctggctcacctgctcctcttacaataatggtcaagtgcccaggtaggctggctgatatgtttggccaccaaaaactgagcaaaggcccctcctgagggcaagggatgtgattaaaagatgcataaggcacggtccttgccctcgaaaagctcttggtctctaaagggctgcagacatgcaccacaggatcacagaaggttatgaagaggccgcgggcaaggagtagtgagctataaccccagagagggtgaggcttgagcagaatcttgcaggaggtaccagagcttattgagtagacaagagggagaaccacagacagagagaagagcaacatgtgatggcccacaggcgggaaagaagcatggagccaccaggcgaggttcttacaaatgaaaagaaaatgttgatgtgtattgtaaacagagaggtgctttttcaatccaaggcatcgcacctttatttcaaaactacttacgctacataatcctgctcatcttctgcctgaaagtgatatgttctattatctaaaataaaaaaaaagaaaaataagtgaaaccttagaaagcagggtactttcaggtacaacacagatttaagttcctgggaagaaaaccagtaaaagtagaattttaatattattttagttttacgccattatgtgccaggtgccttgtgtatattattgctaatcttcacaaaagctctatctgtttctcatatttttacagaaaaaaaaactgaggctccaagaggttcagtgacttacacaaggtcacacggcaataaaacagctacatgattcattctgtcgaggttattcttcttaagtgcaacaagaatacaataaaataaccacaaataccatgcatacatctggcactgcttttgaataaacagtgaggagaggggaaggtcctatttgatccaaatggatttccatgacaaactggagagtgccagctaattcagtattttctgtttcattttcaattcaattgttactgtgttttctttttttttaaagaaatctccttttcagaaatgattcatttactgttccctatttgttctgagacttaaccatggggtagccccaacacccccaacactagacatactatgccccagatgttggggctgctctctggctgaatcaggttgcaggaagaaaggctcaatctctgctatccatgtaagggaaggagtgggaaggagtgacctaacttggatactttgggctggatgtacatgagggaagctctttctcaatatattcaggtcaaactaacatatcctgagcacttcctgtgtgactactctaggctaggcagtcacacccttcatctctcttggagagagagacaatgtgtatgtcaaagaacataccatgcttaatgttacagctcatggctataatcctaacactttgggaggttgaggtaggaggactgcttaagcctaggagttcgagaccagcttcagcaacagagaccctgcctctagacaaaaaattaaaaatcagccagatgtggtggcatgcacctgtggtcccagctacttgggagggtgaagcaggatcactagagcccaggaggttgaggctgcagtgagctgcgactgaaccactgcactgcagcctgggtgacagagtgagaccctgcctcaaaaacaaaaaacaaaacaaaaaaaacccaaaacaaaacaaaacaaaaaaaagaacatgccatgggtggcagagcctgagagctttggttgaatctctgctttattgctgtgtgaccttctgtaggtcactgaacctcttggagtctgagttttttcttctgtaaaatggaaaactgatagggctttcatgaggattagcactaatgtatataaggcacctggcatgtaacagatgctctataactgccaactattattaataacctacagactctcataactaggggtttttggctttttgaagtcataaaataattccaaattttcctatttctttctcatcaataactcaataaatctcttggtcatgaaaatcacagggaatctaaacttcatacagatgctgcagaatacagtttcgactacccctaaagagcctcatgactgactctatcttttgggtcaggactattcacacaactgcatcagaaaggtttcaaagggcaagaaaatatttctgtgcttctatacatagatcatccactttggctgtgggtctgccttgctgggctgtgatagagaaggaaggatacttaagattagtgttgcaggatttcaggatattcacgagagtcacttcaatggcactgtcatcctctctttacaaagaggagtcctctcagctacagtgtgggtcggtaagcacacccataggaatcagtacaagcacaggtagccagcctaaaggaacatctccccccaactctttacacactatgagggcacaggctataacaggctgtggggtgggtagctcattacgctctctcatcacaagagaaaagcaaactctgaaccatgaagtagaagagtgacagggtgcagtgccatcaattcacagaggttgaaggcagttctgcttggaagcaaggaaatgatttttcctttaagagctagattttgcagggatataactctgggcaaattcgttgtacagatatagtggcacatctgcattcccaagtctacatccgtgcttcttaaccacaggtgcacattacaatcacctagtggctttttttttttttttaaactatgtctgggcctcataccaacaactataattcagtagatctaagacagaaatgggaatatactaagaaacatctctccaaggggataaagctgtgtactcacagtcaagcattggtttagttcaatgtacaaatcctagattctattctattgctggtcagatctgacactgctatgccttgtcaactgcaggtgggctcagtggaaattaagagacctggggcatcttcctagagcagcacatgcaggaataactgttccaatgccaactgtgaggagccctgcttggaaaagctgctgacctggagaatggaaatgtgcaggtgtcagaagccacaataaccaactcagagagagaaaaaggactcacgtgatatcaggtcaaaagattttttgtcttcggcattaggttttacttggcaggtgagaaggttcaacttggctggttgcctgttagactggaaaaaaagagaaaatggagaagttacatgcagctccactctcttgtctgcaggttcagtgccctgtagggcaggtatgctgttcataaggcctgctcagtggtacaaaaatacattttcagcaaagaagaaacagacatctgagcattgttccaagtttgctgcaagaagacaacagatctgtaggtttctgccctcaaatataagctggtaagtttagtaaagttttatttatcccagttgaattctgaatctcattaaagatggaaaaaaaaattaggtgtcctactaaatgtctttaaactgtgcataaatatcctggtgatttttcagaagagaataaaaaaataatccacctcacttccaatgaacagtcggcatggtccatggaaatgcacctttctggaacctacccataactaagcaccaacagttggcacttttaatgctgtatcttactatgaaatgtagctgagctatatttcatttattcattcaaaatgaccccggtaatcaatcatccccaaattgatctcccaggtatccatggattcaacaaattttggttgtgatgcaaaatttacattacttctctcagaagtacaatgacaattactacctgtgaggcaatgcttaatgaaccccaatatctggggagagagaaaatttgataaggatttcatataacttatcagcaaatctcttggtcacacatataaaacagaccctatagtatctagatagtcacgctaacttaggaagtctcaccacgtattcacactggtcaaaacactctcctgcctgcccatgttcaaggtcacatgctggacaatggctgatactaggatccctccttcctgcagaagctgaccaaggaatgaaatgtttgagtgcccaggctgggctgtgctcgaacacgagaagcctggagaaataagcaatgaaactctttaattggacctatatccctgtttcgattgagagctgtggttctgaaaatcctagtaccaggtgcatctccagctgaggaattaaaattttcagggaaaagagagggggagggagttagagacaagtcacatcagtaagcctgaaacaacagagatggcatacaatcaagacaccttcaatgacacactgccacctctccttctaaataatgggcattaaacaatttctatttatcttcctgtgctctctggaccatttttcaagatctttctccctctatgatttcaatgagattaaacatagaaaacaatgccctttgtcccatatctatctattccaaagcgaactgctttaggggaggaagtgagagaccccaggggattccatgttcaatgcatgtacctttgatttaggaatggaaccagaagtcaagtacaagagaattttgccaaagaggaaacagtgcttgggaagattcctgtactccagaacttgtcaccaaacctagaaggggaggcaggagcttgtgggcctgcaagtttttctgagaaaacagctgaagagccagacgaggtggctcatgcctgtaatcccagcactttgaaaggctgaggtgggtggatcacctgaggtcgggagttccagacccgcctgatcaacatggagaaaccctgtctctactaaaaatacaaaattagccgggcgtggtgtcgggtgcctgtaatcccagctactcgggaggctgaggcaggagaatcgcttgaacttgggaggtggaggttgcactgagccgagatctcgccactgcactccagcctgggcaacaagagtgaaactccgtctcaaaaaaaaaaaaaaaaaagaaaacagctgaagtgtttgggttgctaaaggcctcagactccaaaatcagaatctgtagccacgaagcaggcttagctcactgtaaaaagaactgttagttctacatctcatctttttggatgttgataaaattgctgactttctcatataaatgacaatggcatatgaccacctgaaaaggcagtgacccagttaatggtgagaacaactcttgctacgatattatgttccaattaggaaaccacatttaaagaaggatgcagaaaagcttggggagatgaagagatgattgaaagggtggaaaatggaaactctgaagatgagttagaggcattacttagtacagaggagggaaagctagggggtgacttaatgaccatcttcaagtatatgaaggttgttattgggaaggttgggcagctgttttccattagctcagatgaaaagaaatacactccaattgcagaagatttgggccagaaataaggaagaacttcccaagcttaagttgattatgcataataagaggtttcaggtttcttaagtagagaaggactgcctttgaaaaatttaataatttttaagctgaccaggcgtggtgtctcatgcctgtaatcccagcactttgggaggctgaggcaggcggatcacctgaggcctggggttcaagaccagcctggccaacgtggcgaaaccccgttgtctctactgaaaatacaaaacttagctaagcatgacggcgcatgcctgtaatcccagctactcaggaggctaaggcaggagaatcacttgagcctgacaggtggaggctgctgtaagccaaagtcacgccattgcactccagcctgggcaacagggtgacagagcaagactccatctcaaaaaaacaaacaaacaaaaaacaaaaaaaaaaagaaaaagaaaaatttagtaatttttagacactattcacatttgaatgtgacagaaggttaactttattttttaattctcccaaaatctagatttctccggtgtttctgaacaatcttaccaacagatacaaccaagagtagatacaaatcttaaaaaaaaaaaaacaacaaaaaaacaccatacactcagctgagtattaactgcattcaggcaagttaaacagcactatttacctctcatttctttctttttctttctcctttttgtttttttttttttgagatagggtctcgctttgtcggccaggctagagtgcactggggtgatcatagatcactgcagtctcaacctcctaggctcaagcgatcctcccacctcagcctcccaagtagctgggactatggatgcacaccatcacacctggttattactatttttttttggtatttttagtggagacagtctctccatgttgcccaggctgctcttaaactcctgagctcaagtgatctgtcagcctcaagtgagattataggcgtgaggcaccatgctggcctcaggtctcagctctcatttctttctttctttcttttttttttaaaaaaaaacttttaggtttgggggtacatgtgaatgtttattatgtaggtaaacatgtgtcacaggggtttgttgtacgtattattttatcatccaggtattaggccaagtacccaatagttaccttttctgctcctttccctcctcccatcctcctcacctctcatttctaagcacggactatttcaaagtattttgctgataaggaatttatatggtttaagtcattccatgattgacccacaacttcagtggtgatgacgttatgatgtttattctcttagaagtttgccaaatctactagactgacttttgctacattaacatgaactgcatttgacacaggcacatcttgcctaaacatagtgctcttctccaaactgagctgccagtgaggcacttgacaaatggccatcatcccaaatgtgactttgaggagccaagtacgcataagttttgactgtctaagcagctgacttacccagggctgagcccacgaataccagaggggagtggtatgttccacagaagtccaaaaaccaaggcatttgaagcacagaaatcactacagtaataattgtaacttcagatgtttgtgtaactttccaaaatttcaaagcactttcttgacatttagtactaatttataggtatattgattggagactgtataatctttcctgggatttcagcagactaaaattaaagtaaaactaaatgatttactctgggctacaccacagtggaacagtttaggaaatgctttcatattgtttaagtacaggagagaaaaaagaaaacaaaacaggagaaactctggaaacgtctatgtatctattgagtccttgctgttgattcccatcctgttcagaataaacacacatctgtgccatgacctccaggcaccaatcgcaggccccttctcgcactcagctcctgtcactctgagttgttcctttggctgaggaggggcactggtccctcctgctgctcacacactcctgcaggccctcggagagctccctgctcactccctgcagaactctcatcaatcagcacctcctcagaggaggcggtacctggcctgaccacctccccatgatgttccatttttgtacaccctgctgtattttctttctggctcttaacactccttatttgcttcctgtcttccttctcactaaggacacacacatttttctcattaaaatgtgcttggcacacatcgggtactagcaagatcatggctcatggcagccttgacctcccaggcgaagtgattgtcctaccttagccttcccagtaactggcactatatgcgcacgctaccacacgaggctaattttaaaaatatgtattttttagagacaggatttcactctgttgcccaggctggaatgcagtggcacaatcatggctcactgcagccttgaactcctgggctcaaggcatcctcctgcctcagcctcccaagtagctgggactacaggcatgcctcaccatgcttgactaattttttaaatttttgtagagatgggatcttggtttgttgcccaggctgatcttaaactcccggcctcaagtgatcctcctgcctcagcctctcaaagtgctgagattatagccatgtaccaccgtgcccagccctcaataaatatttactaaattaatgactacattccaggcatcttatgtcatatactatctcatgtactacctgtgagggaagtcttcagtttcttttactaagtgaagaaataaaggcacagaaaggttaagtaacattcctaagctctcccggtaagaaagtggtttggatgggtcagagcccccactccttctcttctgcggtcactctgcagtccagcctggaaagaaagtaatctgatatagctcggagaataacagctggatgcccagcacacaagaacatttcctcctgattacagtaagggttagaggtcaatgaagcaaaagctccaaagattaatttctattttaatatcttcttgggttatctgactctcctctaagtacttactttcataattggggaaaagagaaattttagaagccactttgaaattcctacttactcattcatcatatatttattaagtctctaccacattccaagcacatctgagaaacacatggtccatgccattaaacatctgtggaaacagacttgattacgtatgggggcccagggagcccagggacctgagctcaagggtgtgcaccaaagatgtaggcaaggttccacacaggcagcctcaaccttcagagaggacttggaggagggaatatggacaaactgggaagtgtgataagcaggtccaaaggcctggggcataggaggggacaagctgcaggaggtgacactgagcacacaggaagggagactctgcatatgatactaagaaactcacattcctatccatgactctggcaatctactggagaaagcagagtggccagttagatctctatttcacggtggggtggtgggggggcagttggtgggaaaggtagaggaggcagagagaggctgagagagtaaggaagatgagcaatgaaatgaggagggcctgaattagagctacgtacggtagtggtgctggtggccagaggcttaagacagctagaaaaggagactttcaatgcatcattccacaagtaatcattacctactatgtgaattattcagtgcagaaatttgaatggtgaatggagggacacattgttcctgaaggctgtcttgagcagcatctctttcaaaagctacaagagcttctctaaatatagttatgacacttttcaaagctgacaattctacaactctgttccttcaaactctgaggcttgtccttttataggtttcacttctcattaaaataaaacacattcatagaagaaaaggagacagagatagtacaaagaagaaaccaaacattagttgttggaatctcactttcacatgcagcaataatcactgttaataccttaattttaccaagatgtgtgtgtgagatgtctgttttttttttttttgacatatgttggttcaacttgtatatactattttgtaaactgtttttcccaattaacaatatacacagatgtcttcattttacacacccctctcctacacaccctcagacaaaaggcaaacctattcaagtttttgatttttgaaaatgtttcaatcagggaagctctgggtacatttcatgaagagaagtgatgaagatatccctctgacataacagaaagtggctgtttagctaggaaaatcatcaaataagtaagtagaaatgcatgcagaaacagaatgagtcaatcccaattaatgtttctgtgtttcctaaaagaaaataaacaccgcacatttgtctttagacagcttagtgtgcaccatggttccagtgtttttgctggaagtgtaaagttgttagcacaggcatatttctcagttagcagaaaacagctgctactggaattagtacccagaaatgaaattatttcctcccatcatcttactgaattgctctgctttacaaacaagaagtgaacattaattacttggaaaataggcctgacccagccaggatgaggctgacgcgtggaaagaggtaaaaataaaatgacaaagctctcttcacttcctatgctagtgtctgaaaacagagctgctcagaccattatggtcatttcaaagttttcattcaataaatagttttttagacacctactgtgccctacagggacatatatttttggcatacaatcaataactacaaccgtggtaagaaattaaggtacatgctgaacacttaccactgcagagagatcttatcgccagaattttagcaatcaagactattggcttttggccttccaaacagataaaaggtaacaattttttgaaaaactgagtacctaaactgccagatacattatatgaattctattatttaatttttgcaatgactctatgagttaggtactgttcccaaacccatttcataaatgaggtaaccaaggatcaggaaggtgaagtaaactaacctatgttttacaaaaaataaaaggcaaagctgaattctgaacaaatctcttctcacttatcacactgtttccctgtcaagccaagccctaggaaaacttacaaagtcagtcaaaatatagctttactgttttgccttttctggttcttactgcccttaaatggccagttccctcatcttccctccagatgcacgttccaaattccaaacttattactctgtggccacaactaaagctctcacatcccctgtgtgatccttcagacagggaaaaagataagtagtgattatctaactgaagtaattcattctagggtagatggctgaattcccttaaccctcccaaccattttactaatttttttgtcaaacatttatcactgtatctcccaatcattttaataaagggactcatttccagttggcagaatgtatgtatatgtgagaaagaaatatttgaaaatggagatctccaagaaaatgttttttattgcagcaaggaatcggttaccttacttttgagaggatgttccactcaaatcaacattaaacaatcaatgctacaatgcaaatagaaaaaaagagcttactggggctcctgctaagacgtggcgctgaggttactgcacccaatgaatgtgctagatagtcatccacgcaggcatttctgcaaatatgtattaagtacctactatttgatagtatatagagtttgggccaatacaggaagaatttttaaattcacatttcctattaatttcagtagccactttacgtcatgctatccaacaagggtacataaaactaaaaccttcagacttggaatatttgtataaaatgcattaatttgatagtaaaacatctgagctatggcatatgtttttttcttttttttagacggagtctcgctctgttgcccagactggagtacagtggtgtgatcttggcttactgcaacctctgcctcctgggttcaagcgattctcctgcctcagcctcccgagtagctgggattacaggcacgcgccaccacacccggctacttttctgtatttttagtagagacggggtttcaccatgttggccaggctgttcttgaactcatgacctcatgaatggctgagacaaaatgtgcttgaggcttttattagcctcacacagaaagggcagtctttaaagcgagggcatcattatgttgatgagaacacagcatttactcatgctgggctccatgccatatgttttacatatacttgctcacttaattctgataaccaccctacaactaagtaccactattattactatttgagagatgtggaaaataaggcaccaaaaggttaagttaactcagccttaaggtcacagctgttaacaacagaacattaggtcaaagtaaaacttttttttttttttttgagatggggtctcactctgtcgcccagggtggggtacggtggtgtgatctcggctcattgcaacctctgccacatgggcttcagtgatcctcctgcctgagcctcccaaggagctggtacaacaggcatgtgccaccatacctggctaagttttgtgttttttttttttttttttagagatggggttttgccacgtagcccaggctggtctccaagtcctggacttaagcctcaaactcccaaagtgctgggtttacaggtgagagccaatgcacctggcctgaaacattttaaagaactctattatttcttatattaggaatgtgggcaggaggtaacatcacagctgatgtcaaactgcaggttccttggttttataccttcaaatttgtaaatcaagactttaaaaaagcctttttaccccttagtaaaagtaaaaaaaacctttttaccccttagcatataccttcgtatatgctaagacctctgtatatgctaaggaccaacagcacatactctaaccaaatggtcacactttctaaatttgtgagctctaaatttgtgagcctgggtttaactggctccaaagttcgccctcttacaactgacagtgctgctttctaatctgttggagcgaagaaaaatattctcattctctcttttcagtgacaatgagagtaaagacgtggaatcagaggacagccaaggagagctccgaaggccagtaacagaaacaaggttactgaatacattaatagcaaagaagagagcaatccattttgcaggtctcttcctgtttcctgtatgtgctttcagtgcttcttttaaagccctggaagctgaatgttatcttcagcgctctggatggggcaagaaaacaacagaccttagacccaaagatccaaaggaaagggagaagagacacatccaattcttgctttagtgaaatgccatggaaggtgacagagctgctgttaatccctaaaggcagaaattaaatttctatgaaagaagaggtaccccaaatgggctctgtaaagtacactgagtagtaatgaaaatagcaatacaaaagaattccaacggccaggtgtggcagctcatgtctgtaatcccagaactttgggaagccgaggtgggtggatcacttgaagtcatgaatttgagaccagcccggccaacatggtgaaaccccgtctctactaaaaatactaaaaattagctggctgtggtggcgcatgcctgtagtcccagctactcaggaggctgtgacatgagaattgcttgagcccagggagccaagatggtgccactgcactccaaagggaaatgcagtctcaaaaaaaaaaaaaaaaaaaaaaaaaaaaagaattccaataaaccacagtttaaaatggggatagttgtacattagagaagtagtaatactaatagctgacatttattgagcactaattctgccctacattctgttctaattatttataatcaataaactcatttaatctttacaatcacttatgaattaggcctcattaatagccccattttatttagatggaaaatcctcactagagattcagtgtcagggttgaaattcaagtctaggcagtctggctccagggttccagatgctgtgatcctacttcagctcactgagatgacaacagctattaagtttaaggaacacttattgcggtccaggctctgcaaagctttaaatgcatcatcttatttaattctcgtaacatggaagacaggtactgttattctgtttcacagattagtacaagttaagtagcttaataaaaggcacatacaataagatcctgaatgggcatttactgcagatggactcaaaaggatgtggtctgactctccccctgttcaaaatgatcagcccatcaagcaggtggacacacacacattatctacctaagaggtggaacctctaaagaggccagctggatttccaacccttttgagtaaaacaccagaccttaatgaacttctgtgtgctattaaaaatactgttggtgttggttgattgagaaaaaagtgacaataaatttaataatcgttgtaagtgttaatcataagggcatctgaagacatctgaaagatgtaatgcattatttaggcagtttcagattcaaatataaattcttagaacacttgcattatcttcatgacaagtactcctccttctcctcccttcccggaatcccttacagccctctctaccctaagacccctgactaattcaaggagtatcaaggtaaggccaaggtaagcagttccactgcaaagaactgttattcatgaaactttcaaagacctaacaacaatctggcagctgaggaaaaaaaaaccctatgatacagtagaaagagtacaggctttaaggctggaaaactggtccagctatttacaaacttcatgaccctgagcatgggatttaacctctctgagcttcatctataaaatgcagtctcattagaaaagtattcactgagcactaagtacacgtcaggcaatgtgttaggtactgaaaattcaaagatgagtaagatgcggtccctacctcctaggaatttccagcatggtgagaaatgaagatagtgatgcctatcctgtagggccatcttgaagatgaagtgcagggtgcattctaagtgctgcataaatggcagttctctttctttttacaacccattatttaaacagaatgtgacactggttaattcacagaacagggtttttgaagaacatagctgcttatacttttgaaattgatttctcaagattactacaataaatatgtcaactataattcttatactttctgttgtaatttgttttatgatatttatttatactacaatacttttagttagaaaaaacaaacaattcaaaactatagaaatgataatagtttagtcgcttcatataagctttatacttgagttttgaggctaaaacttttttttcttgagacagggcctggctctgtcgcccaggctggagtgcagtggcgcaatcttggctcactgcggcctctgcctcccaggttcaagcgatcctcccacttcacagcctcccaagtagctgggaatacaggtgtgcaccatcatgcccagctaatttttgcatttttttttttttttttgtagagatagggtttctccatgttgcccaggctggtctcgaactcctgggctcaagtgatctgcctgtctcagcctcccaaaatgaggcatgagcggattacaggcatgagccaccgcgcctggcctgaggctaactgaaatgtttgccaaagatttgttggaactggtattttgaaatgaaagcatcttatactgtgtttagaacatactagatggtccatagttggaagctgctatcacaatattactactgttatagcaaattcagagattcacactgaatttggttcccacaattctgcattactttgaatagttggtaaaagaattttttttgttttaacagatacatgaaaagcaaagaatttatgaatgaaatcttctaaggatgggctgccaatttttcaggtgtacacagaaatgtatttctctttagaacagtaagctggggagatgaatcacctctggtgcagaccttgcttgggtggccaagccaacaaaccctgcatcattaatctaaatgcatacttggccttctcctgaatcactttgataagaacaatttgcaaaggtgacactgatgagggccttcaaaccaaagaatttccatgtgtcccaaacacctcaagttttctgacaacaaaagctcttctccccactttttcaaagaagccctttatgtttttctcagaaaactgctggccttgattttcaatctaattctaatcaatggtgtttgcaaagtcaggaaaagcccgctaaaactggctagagacctttctgtgggagcagcaatgtgattatgagtgatgttactggcagcaaaaaaggtctgggccaaagccagtgaaaagtggggaacagaatagcacaaattagcaggagggaatcagaagttaggagagtaagccatttccctccaggctgctctgggggcaggagagtgctgatgtttgtagcaggagggtttgcttgtcaacagatttcagtattgtcagcaacatccaataaactaacggtaatagcagcaataagtattaacagaatggccacacatggcatgttatctcactgaatcctcatataatctttatgtgttaaatacttttctcaaggtcacaaagtaaatggcaaagttggcattcagactcacatcagacagatgccacagtccattatcttagccactaaacaatgtggatgatgtgatgagacttgttaattcaagccttaagaatgcatataaacagttgttttggccacaacaatgtgttttggcaggaataaaatcaggagggggaagggaacttattttatttttagcaaattgcccaaggtcatataaccactaagcagtgccactgattcacttcatcaactatatgatctcccatcactctgcactgccttccacagcagattcctaagaaaagcaaatagatacaacatgataaaaccatcatataacttctcaaaatgcctagtgaggactgttacagcctcacaaatcccaggggagagctctgcagcagaaggcaaagagagttagggtatgcatggtaacgctggccaggtgcggtggctcatgcctgtaatcccagcactttgggaggccgaggcgggtggatcacttaagctcaggagcttgagaccagctgggcaacacagcgaaacccctacctctacaaaaaaataccaaaattagctgggcgtggtgaagtgtgcctgcattcccagctacttaggaggctgagatgggaggatggcttgggcccaggatgcagaggttgcagtaagccgagatcgtgctactgcattccagcctgggcgacagagccagaccctgtctcaaacaaaacaaaacaaaaacatggtaactgactaaaaactcaccatctatatagtcaaaggatcagaaatgttcactctggcatacacagatgactgtgtatggaattaaatataagaaaataaaaattatctaatttttcattcatgcatctttgatgcctacaccagaacatggcagaatggaagcttaacaaaagattgctgaagaagggccaggcgtgcaggctcacgcctgtaatcccagcactttgggaggccgaagcgggcagatcacaaggtcaggagtttgagaccagcctggtcaatatgatgaaaccctgtctctactaaaaatacaaaaattagccaggtgtggtggtgggcgcctgtagtcccagctactcaagaggctgaggcaggagactcgcttgaacctgggagatggaggttacagtgagccaagactgcaccactgcactccagcctgggtgaaagagcgagactcagtctcaaaaaaaaaaaaaaaaaaaaaaaaaaaaaaaaaaaaaaaaagattgctgaagaaatgaataactgttagacagcctcaatcataattacaaacagatccaagtctgtagacaggatttctgatatcagatgggtagctggacacaactggcatgacagctaaaaatctcagctgggctgtttgagggaaattgcagacctctgaggaattcctccgaagaatcactgaaaagtgtgctgcgaggggcaagggacagagacaatgcaactgctcaagttccataaaggacaacaatctttaagatgtgtgcagtcatttaccacaaaggactgggccacaagtgtatactaagagccttctgtatgtcaagttctgtgtgagaggctgaagacagaaagaacaggactagtaagtgcccaagggggcgcttacagtctagtaagatgatgtgttctgcaggaagagagagaaaggccacaaggactaatgtcagacagacacccgagtttgaacttccaattctgtgagtaactagccaagttacagctgttctttgtgcttcagtttcttcatctgtaaaatgaaggttattataccacatgggttgttgggaggattaactgaaataaagtttatgaaggtaagtggtacttcctttcctccctgatagatatctaaagtcagctgtaagtcatacaaaattgccaacataataaatgctcatctctcttttctactattctgctggcaattcattgagcagtgccccaaggacatcacttggcacaggatactgtaatttaatgagtttttaaaatccaaactgagattactgggttaaacagcaagcacattaaaaaagtcttggcatatactttgccatttccattcctgcttggtacattttccactacaatctctgcatctttaagaactgaaaagagttttctgttggtttaaaaagggcaaaacttactgtgcacttctttgactaccaccaaggtttttacatctactgttacgtttcctacattatttttacatgcaaagaacagcctgtcatctctataattcaaagacctaggtttttcagaacaatcaatatttcccaaaagataatattatgaaatcaaaataccgtattcattttgagagagcaaaaaaacaagtttctagtgatgccaaagaatggtgcagactaccacaggacaagataaaactttttttttttttttttggtaaaggaatatctaaaatgatctgacccaaatgcataaatatatttgcgccaatttttactgctgagtacataatcgtgtttgctttctggcccatgaggcagggtaaattaagaaacatacttactgtggcatgtgagatggtcagaatcccattcttgactgaacacttcctcctctgccatactttccggatcctaaggaggaagtcaaacacaactagatatagtaactgattcactctgggacatgcgacgatacagtatgatacataataataattacaaaataacttccccaaaccaaaaaatccaacccccccaaaaaaatcctggttgccttttattatcccaggtggaaggtaattcacacaagtagccatgtacaaggatgctcattacagcactgctttttaattttttttttgagatggagtcttgctctgttgcccaagatagagtggtgcagtggcatgatctcggctcactgcaacctccatctcccgggttgaagcgattctcctgcctcagcctcccgagcagctgggattacaggctcctgccactgcgcccggctaatttttttatttttagtagaaatggggcttcaccatcttggccaggctggtctcgaactcctgacctcatgatccaccagccttggcctcccaaagtgctgagattacaggtgtgagccacagcacctggccagcactgctttttaaatatatatatatatatatatatatatgtatatatatatatatatatatatattttgagacagggtcttgctctgacatccaggctagagtacagtggcataatcatggctcactgcagccttgacttctcagactcatatgatcctcccacctcaacctccagagtagctgggaccacaggcacaccccaccatgcctggctaatttttacattttttgtagacaaggttttgccatgttgcccagaatggtctcaaactcctgggctcatgcaatctgcccgcctcgccctcccagaatgctgaaattacaggtgtgagccactgtgactggccgtggcactgctttggacagtaaaaatgggaaatagaaacaataataatctaacagcaggagactcaataaatgaatgacaggtactacaatgatataataataactcctctctaggaaggggacccaaacctgttgggggtggtgttaattaagtagttttcaatcatatctgtgaatctttcataagaatgttcaattgattacttttgttattaataattgatttttaaaaattaagaaagtggttgggcatggtggctcatgcccgtaatcccagcactctgggaggctgaggtgggaggactgcttcagcccaggagttcaagaccagcctggacaacatagggaaatcccatatctacaaaaaataaaaattaaagttaagaaagtaactcaagaagtctgccatgcaaggagcgaggggtgaactgcctcgggaggtacaggacaagcttagccagggctcaagaatgcatcatcatttttggtaactcatacaccacccctttaggggtcttccagagacagaatggtgcctcagagccccgagaaaaaactgttcatgattcacaaagggaagtaaatggtgaccaaatcattcacaaatagttagtaacaagtgatagacattttgaaaaatgtgatttgatgatattgaaggataaaaaaagccaaagagaacgaattaaaacttggaagagttttgtgtgtgtgaagctccaggcacagacgagactgcatgtgtggtagatctgcgtgtgtgcaggtagatgcaaatgcactagttgagactaactacttccatcagataagaagaaatgggcagggaacagtgattccctaggctggaagtaagttttgaaggccttctgttgctgtggaaacaaatgacatcaggagaccactgtagctttcccaggcatttaaaacagtatcatcttatgtttttcttttccttcttaaattagtcctctaagaaagctgccacaacacaaatttaaaaccatctctaaacacaaataatattgtgcatttaactactagaagcacagtttgttctaaagcatgcttcacagaaggaagtaagaatctgacaccatctaaccaaatgcaaattgaacatactgtattcagaatgctagccttgctgaggaggtaatttaactactaattgataaaccatcctcaaataagagctaaatcacatactttcttctagaagtactggccagggaaatgtctgattagaggtggcatctctcaactaatcagagccacatttggttaacgtgactaactctctgcaagtagttttgcatccatcttactctcacaagagcctgctaacataggtgaggcatccctgtatacactaagccaaaaccagtgtcatcctaaatatcaaacactcaatccaccaatcaaactattcaaccttcaggaatagtttaaagcctcagtttatccattttattaagtctttactcattagttttacttacacatgtatattatggaaacaatacacacacacgcgcgcacacaccccttctcttctgctgctaataaagccaaggaaagtaacacagaagcattattctgggttgacagagattgtgactgaggcactttcagatcgccagaggaaagggaacaatcttgagatatctcctggcacagttgagagcagtattgcctgatcttttgtgtgcgagagagacagggtgtcactttgtaacccaggctagagtgcagtggtgcgatcatggctcactgcagtcttgacctcccaggctcaagcgatactcccacctcggcctcctgagtagctgggcctacaagcatgtgccactacgcctggctaatttttgtagagatagggttttgccatgtcgcccaggctggtgggctcacgtgatctgccggcctcggcctcctaaagtgttgggattacaggcatgagccactgcgcccagccagcacctgatctttgtgaacattttgatagcttctattcccaagacttctatggactagactgaattgctgtgatctcccccactctctgtactgaaagctttacaaatgttccagtctgcatagctcctgaatggacataccaaagactcttggcatctggtgctcacagagagtgccacacacgattactgattatgccatgctagaatcttacaattccagaaaagaaaattctattagaaaatggtctcgtataaatagataattccaactttgatgccagatcacttgagctttgatcccagcgcgatctctagctatgtgactttgctcatgttatttgacctcttggagactcattctccttttctgtattacaaagacagtaatgcccactttcgtacatataatgagaaaatataataaagcaattgctcctttgtctctcaataattgcctctggtccataaagttttaaaaaattatttttataatcctttaagtaataaagagcattccaaagctagggtcaaaaattaccaacgcaaataatacttcagagaaaaatcacaggacatatcagtggtcattgtttgcaaatgagtctgttttcatgtataagcatttcaattttttactcttccacagaagtcacaagcaactccaggttattagtgctcatctttgctatctgtgccattattaggaggtggaaccacctgacttccaacctcctttccaactctatgatccaacagctctgtctgtatctctttccaacagactgcagtcaaagtgagggtgaggaccgtatctcatttatgttttacctccagcatctagcaggctgcctcatacactagagtatttcatctatgtgtgtggaatgagtacatgaaggaaaagaacaaaagaacgaagaagtcaagggggtgaatttgtgccagtttatgccttgcatatccttagagtgataacagcagcagtggcccttttgaaaaacaaaggggagataccctggcattaagtcagaagacccaggttcaaatttgagtgttcatacttactgtccgtatgatcttagtcaaattatttaatccctctgtaaaagatgtcaaatgagatgagtgagcaggcacctgggtgtgtggcaggcatacacaggtgctctcaagataatttacttgaacactttagggtttgaactatgcaacacttaagaaaagactgttgatcttccttggatatacagattttaaccgtttcacttagaattaggcaattctaatttcaagaagatcattgtgatttcgggagagtagtgttaaaaaatgacttttatacttttgcttcaatagatatgtaatagtacattgttgctcataatggaacacaatattaacttttcgtttgatgacagaacaggtcacatttccaagagatgtttgtaccacagatggtcagggaagaacaaggagctgagcctgaggcttttcagcaagataagctatggaatttacaatttatgtacactttatctcatgcagtttggactagcatttggtcaccattctagagcccagtttaaatctgtgaattgttagttgggatttcttttctccttttactttcacagcaggattaagctaactgattctacaatgagccagatgctggacgaggggtgattttctttctctacaccccatatcagcaagtcctgctgcccctgcctccattatccacaactgaccactttttaccctctcttctgcagttcccctggcctcatcatcagctcccatctaggtttctgatgcagccctccctctaactggtctccttgtctctgtgctttcaccctccatgactctgctttgcttggtagtcagagagaagcttccaaaacatgttggattatgtcactcttgtgctcaaaaccctctaatgattccccacctcacggagtggttccctgtccctctgaccttatctcctatgacctcctggcttgctcactactctagctacattgaactctcaagtatttgtcaccatgagatgcatgctcctgactacttcctcttctcccaggtatctgcatagatttctctcacttcctttgctcaaacatcaacttgataaagtcttccctaatcacctgtataatagcaagaaccactcccatcccccacaccacctgcatctcttgcttgatctttctccgtagcactaattaccatctgatctaccatatattgagtattttttgtctctttccttccttagaatgtcagctctatcagggccagattttcttttgttcaatgctgtattctcaggacctagaagagtgagtcctagacatacagcaggactcaaaatatctttgttgaatgcatgagtagaataataagcaaaacagtcaatgaccccagaaatttagaagagaaatatttataattttaacaaacaaattacagtaaaaaatgtacatgtctcagattaagccaaggagtacgtatccacaagtaatcagaaaacaaggagctttcttttaaaaaaaaacaatgacaataggccaggcacagtgagtcatgcccgtaatcccaatactttgggggaccaaggtgggagaatttcttgaggccaggagttcaagaccagcctgggcaacaaagagggaccctgcttatatttaaaaaaaaaaaaaaaaagtatccaggcatggtggcatgtgcctatagtcccagctactcaggaggctgaggtggtagaatcgcttgtgcccaggaattgggaggttgtagtgagctgtgatggtgccactgtactccagcctggaagacagagcaaggtcctgtcccctccctccaaaaagacaattattaaagggaataatgaagattctacttatgcacttactgtgaagcagaatcatttgtttaagcaacagaaaagaagcctcatgtggcaggatcaggggagaaaatggaacaagatgaggtgggacaggaaggcagggttgagatgctatatgcaaagggaagccgctggagtattttaagcaggcgaatgacatcatatgctttatgatttttttttttttgtctcgcactgttgcccaggctggagtgcagtggtgcgatctcagctcactgcaagctctgcctccagggttcgcaccattctcctgcctcagcctcccaagtagctgggaccacaggtgcctgccaccatgcctggctaattttttgtatttttagtagagacggggtttcactgtgttagccaggatggtctcgatctcctgacctcgtgatctgcccacctcggcctcccaaagtgctgggattacaggcgtgagccaccgcgcccggctgtgctttatgatttttaaaagaccactctaattgctgtgtgaaggtgaactgcagaaaaagaagaatgagcgatacaaagagaccagttaggaggccgctgaatactccaggagagacagcagcagctcaccctagagcaggggctgaggggatggcaagagtatattactttcagagttagaaatggaagagcttttgccagattggctataatacaagaggcaaaagaggagtcaagggtgacacccaaggttgggtggcctggtgagcaacaggcagagaaaactgcagtgaataaaagggtagaggggccgggcacggtggctcacacctaaaatcccagcactttgggaggctgaggtgggcagatcacaaggtcagaagatcgagaccaacctggctaacatggtgaaatctcgtctctagtaaaaatacaaaaaattagccaggcgtggtggcaggcgcctgcagtcccagctactcgggaggctgaggcaggagaatggcgtgaactcaggaaaaaaaaaaaaaaaaaaaagcggagaggtgggtgagtatgaggtcagcacttgcctgctgcatgtgctactcagtagctgccttcctataattgcacgttacaagacagaagtgccatttagggaccacagagcaattactgtttcttctaaagagagctggtcaaatctcggatttacttgaagaaaaccagtgtgctaaaggtctgcagctagtgtattataaaattttaagtgtgtttccctatatgagagactggaaacattttctaggttaatcacacactgagacactgggctgggctcatacatacccgtcacttttctttagcaggtaccccttcttttcactgccatattccttattgccctggagctgatgcatgctgtatcctccttgccggctctgagaatcctaggaaagaaaaactacagattaaacaaaaactagagacaattctcccatctttgattctattctgccattgagcctttggcactggtctgggtctaagggaattatggaactttaagagctgtcaggtcctttcctttattttagaggaggaaacagggcagctaaacacttgccagagtcacaaagcaagtccgaggcagagctggggtctgggtctctgatttctagttcaaaacccacctctactctgaactgaattcaaacaagcacaatgcactggtagacagactactgtaagactgaatccagtttacactagcggcagaggcaaacacaggagggactggaaaaaatgaagtggaccagaaaataaagtccatgcaacccaaacatgttcttcccttaggctgtacctttctccctttacacattctgccaatatgcccccaaataaaaggggaaccttctaagcaaggttttaacaattattatgtctctcattttgtaattagtgctctgtaaaatatacctataaccacattttttaaattaagacaattctacagcagtgaaaagtgttatgatgtcgtggagggtgacaagggccaaaccaacaacatagatgtaaaaaaggttgatttattattagcattccactgacatttaaccatagtttctaaggactacatgactagaaacagccattacattacgaaaatgtaagaaataaaatcaacaacgttgaactgcagaacgagaacatggtctttagacatacaagtaggacaatatattctcataaaaagtattgacttactctcctagacttcgatcaggaagggcaaaagaaacagagaaaaaaggcagaacatttgaaaatatagttaatttcattgaaaatgttatccataatttaagcattttatataatgtacacagaaaatatcactgtaaagataataccagaaaacacatacacctctagattcaggataaactttgggtgacaggacaatcaaatgtctgtatttatcaggttttatttcaggtcatatggcgtgagaacagaaacatggctaaatagaagaatgtgaggcacacacacattttaggaagataaaatggttgacaaacctcaaatgtgtatgtatagggaatcaatacctcagtgaaacccaaaatgaattattcagaaaatctaggaatagccacaaattgtagcaggactttttttttttatttttccccaagggaaaagaacttaaatatatccagttcataaacaacacctgaaatgtgatagtgtcgaggtaagctgaaccaaccactggctatttactgacttgtgtacgaaatacctttaacgccaggatggcttctttctgacactcaggatccttttgggccaagtaatgtatgttcagtgatgcaaaattaatataagtaacaatcaaaggaaaatcatagattccgtgttcaaaagcatgtcctgaatacctcctaaaagccaggtattaaggaccctgagtatacaacataagccctggctttgacatggacgctcacactctcaccatatcactgtcctgctctcttgtgtaggtaactgggagcttactgtacacttaaccaggcaagctgactcacattaaagaggttacaaacttgagttattttctatttgaataatttctctgtttataactggccagattccctccatatgaaacatttaattggacaatattaatcatttgggagagatgaggcatggacttgaatctaggattttcttgcaaaattctccctaaatatttccttttaaaaaatacatatgtatatatttatttttgagacagggtcttgctttgttgcccaggctgaatgcaatagtgtgatcacagctcactgcggcctgaacctcccaagctgaaatgagtctctcgcctcagccttctgagtagctgggactacaggtgtgtgctaccatgtcaggctaatttttgcttttttgtagggatggggtttcactgtgttgcccaggctggtcttgaactcctggacacaagcaattctcctactttggccttccgaggtgctgggattacaggtgtgagcaccatgctcgacctaaatgttcacttttaatcagggcctatagccttgaattctatagtaatgtggttcactaagtcctccctaatagatattttcacactttctaaatggaggtaggactgagggactgtactaaatagcagacaagcaagaagagcagccttcccctaccaatacctccagcaacagtccctagtaacaacagtagtaacaggtttttgttttgttgttgtttttttaagagaggcagcagtgtgttcataatcctaatgaagaaaaatggattgggttgcagggaactgaggcatgagacaaagcaagaggcagggattaaagaaatccacagggctttctgctttaatccaacaaaatcacaggaaaattactcaattatgaatttggagtcagggatctctgccctatctgtatcttccagaaacattaaaaacatggccaggcgcagtggctcacgcctgtaatcccagcactttgggaggctgaggcgggtggatcatgaggtcaggagatcgagaccatcctggctaacacggtgaaaccccgtctctactaaaaatacaaaaaattagccgggcgtggtggcgggcgcctgtactcccagctactcaggaggctgaggcagaagaatggcgtgaacccaggaggcggggcttgcagtgaaccgagattgcgccactgcactccagcctgggcgacagagggagactccgtctcaaaaaaaaaaaaaaacaaacaaaatctaaaatttccctgtacactggtgctcactcataaccctcttccttggaacccttgttacggaactagacttctcttcatctgcccacataattcctaggtctgtccaaatgctttaaaactatgtatctctcgtggtagttttctttttggcacatttgttaagttttcaaatgggcctaacactgccacatgtattatactggagttggcaaaggcctgtgacaatgagatatctctcaagcctttcacgcctttcctctatcagagaatggctcccacatgtggcaggaaaacaaaaacaaaaacaaaaatggatgtctcactactaggcactcaatcaaaaacaagcaactgtgtatctctaatcttaacctttgctaacctttaaaataaaacactaagtttaaaaaataaaaatacttcttttaaacaaggattcagacactaacaacttataaaaacgattatattctgtaaatgtatcattaagacgttccttatatatttattactagcttaagtaaaccttaaattctgaataacaaactcctcggagtgaatgtgcttgctttacatcaaactaatatgcttttaaagatgaataaagtggctaaactccagggtttgacctcattaaactgagcagaaaggaagcagtatgtttcagaagtttagtatcaacaatcctaaattaactatgaatgagtttcatggcttaataaagtcacaccgattattacttgtgctctttgagaaatgatggccattcagcttgctaagcagggcactctagacaaatgcaaagaggattttctttcctgagaaagtagatactggacatttaataacattaacaacaatttaaaaactgacacactgaaggaatgaaataggttctgaatcctttgatagtgttaacggaaattatgtattcaggaaacagaaaaactcatttgggcaaaaacataaaacataaacaatgaacttaaaatctttttaatttcctattctctattagtatagacaaatcactttcttatttgaaaatcttattaatgtataaaatgtattattaagaggtagagtctcaaatcttttaaaagtgcaagcaattatacattcattgatttaatggggctataaatgtttctggtatccaatttaaaactaaacctctactacagaagcctaaaatttctaatgcaaggtatcaatggagtgggcaaaagattccttctgtttcatttttctaaatatttgaatagttttctgggaccaggctacaggacagatactgtgacatgagtaaaacagaaacaaagaatctgtcaaacctgcaaacgataatgtgatggggttttaaaagagtccataagtgaattcaaacaaaacaggtgtaatttttggaataattctgtatatcctaaatatgacttatcaccatttaaaatactttcaggccaggcgcagtagctcatgcctgtaatcccagcactttgggaggctgaggcgggcagatcacttgaggtcacttgaggagttcgagaccagcctggccaacatggtgaaaccccggtctctactaaaaacataaaaattagccaggcgtggtggtacatgcctgtagtcccagctacttgggaggctgaggcacgagaatcacttgaacctgggaggcagaggctgcagtgagcgagatttgtaccactgcactccagtctgggcgacagagactccgtctcaaaaaaaccaaaacaaaaacctacttccaactctaaaaacagttatatagcaaatagttcttttgtagattaagctattacaaaagcttaatataatttcatagaacatttatttgctaagacaataaaaacttaatagaaaaaaaatgagtttactgaaattccagggatcctattcacaactaaaattcttggaacttcctttaatggagccaagttagaacccggtggggatgagtaggctaaatgatttgttgggtgcttttgattcctcagttaatctttaagattacttgacattcttttcaaatagtaccatggtcagaactctctgtggatggtctcctctcacatttaatctcagtcatgaaaaatcactatcttctaaacatattctgcaatgagtgatgataaacagcatgagaaaggaacaggcatgttgtgaaagatcaatgtattacttgtaaaactctgtgatgcaaggtactaatgaaaactcatcatttattaatctggggtggggttaaatcaaatcatgtgcatttcatcatgtacacattcctttggcttatatgcaactttgttctttagctagcatgagcggaacacttaagtctccatgcaaaacaaaaaggggttgtaacagtcctcctctttatttttcaagaaagcttccatatgtaggaaagaggtaatactgtgtgacaaaacaaaggtagggagtggttaagtacatacagtaagtaaaacaacaataaacaaaaaaaccccaaaaaacctcacaatattctcccaagactgaaatctaccaccccgtactcccttctacctgggtctttttaatgctcttacactgagaaatcattcaaagagaccacatttctcctaggatttatgtgtcagtaataagcaccttcaaagggcatgcatggcatatctgtgcttcagtctgaagtctactgggggtctaatacttggaaattcttgtaaatcacagtcagaggcctcaaaccacaggtgcagtcactgcctgagactgaatgacatggatgcagaaactgccttagtgtacacagatgttcctggccactctgcctactccacaggttagcagatgcctagtgttacagtgctatagacttctctcacttgaccaatccccagtgcatatacctggatttggagaaccagaaaaatagaggcttatattcactcaataaagaaaaccttcagggttgctttaaaagattagtgtcactagtgcagggcttcccatgttttatgggagttgttttgttttagactcataaacccctttcagaaattttagaaattaaaataagtgaacttgctattgttgtgtgatagtatttaaaaactgactataaaaatgctgtatttcatgttattattattaaatattgctcttcattttttgtttgtttgtttgtttgaggcagggtcttcctccattgcccaggctggagtacagtgacacaaatacagcttactacagcctccacttcctgggctcctcagcttccctagtagctgggactacaggcacatgccaccatgcgtggctaatttttcaaaattttttgtagacacaggctcttactttgttgcctaggctggtctcaaactcctgggcccaagtgatcctcccaccttggcctcccaaaatgtttggattacaggcatgagccactgctcttaaatttaacccataatttcataacaaaaacaggcacgtttttaatttctcccagaaaacaaatggtgcttactgtttaatttatccttatcatgaagtctacgtcccttagtacaacacccaaggtcctccgtagtcaggtctgagtttttacctcagaaactgcatttctgactcctccacccatcctgccccaaaatgtctgcagccccttgaatatgctggggagttttccatctctgggtcttgtaggtttctgtctggctgcagtcatcttccaatgtatctctaatagtatccataccactttaggcatgatggattgttcatatggctgactagataatgagctactagatgaaagggactaaagcttagtacctagaactgtgcctggcacacagcaggtgttaatgaaatgtttgaacaaatgacatttataactaaggatctgtactgcattcatccagcctctaccatgcattctatgctctttcaatatccaaggaccaactcacctcaaatttcctaattgtggggcaaagcttctgtaggattctgcatcaaaatatttccctggcaaatgagacatgcctgttttggctgcccagaaagacagaagtggtctaaagaggaaagttgtagaatgtactatgtttcagcatatgctcctgaagtgcatgtcctcaaaactaggattgaaaatctatagtcatggggctgggcacagtggctcatgtctgtaatcccagaattttgggaggccgaggtgggagaattgcttgagtccagcagttcaagaccagccagggcaacatggtcaaactccatctctacaaaaaatacaaaaattatccaggcatggtggcatgtgcctgtagtcccagctacctgggaggctgaggtggaatggttgaggtcaaggctgcgatgagccataagtgtgcctgccgcctcactctagcctgggtgacagagtgagaccctgtctcaaaaaagtaaagaaaaaagaaaaaaaaaaaatccagagtcatggaattggatacccagaacatctttcctataagcaaggaaaaggaactaaaatacagtttctacatggggcttatggtaggtacatacttgcatattatatatcactgtgcctgtcttgcagatcaggaaacacaaagggtattacaagcagccttacctacactgttagccctgttgtaaacatgtaaaccacttacttctttctgatccagttgaagagaggattttattaagtctcggagtgcagttagctgtttcttttcttcatcctgggtctgttttatctatgaaaaaaaaattacttctattacttaccatttacactttcacaggcagagtttaatttatccaaaaataccactcatcaaaattctattatatatttggttttcttactaaaagtcctttatactgtctcatttttgatatgatatttctcatcttataaaagcagcagtgggttttgaaattagtgaataatgcaacatgcattcttattaaataacctatctaagctagatagttaactctgaagtactattctaaacagcttatatcattgagattatttgcttctggtttttcaaagggtggtaatgaaaataccataatgtgattaaatggtccaggagagaatcctaagaatgaccaggagtctaatgggccaatgcatacatcaaagtttacatagcatgaaatggggacaagggatcagtgctgctttttttaaccacttgggacttaactgtaacctgaaccatgttaactactaaaagaaaatcagaaaaaatacatagctatgcatttttaaagttatataaaaggcattctttgtaattataaaactttatttgaggatatttactcatactcataatatatacgcttttatttacccccaaatgatttttgggcaacaactttaccatttctaatatatacatttagacctagacactaaaaaaagagagataatataaaacatgcaaaaaacaaaacaaaacaaaacaaaaacccttataaatcaaaggcgtggtggctcacgcttgtaatcccagcactttgggaggccaaggcgggtggatcacttgagctcaggagttcaagactagtctgggcaacacagtgaaaccccatctgtaccaaaaggctgaggcacgagaattgcttgagcccagaaggcggacattgcagtgagccaagatcgtgccactgtactccagcctgggcgacagagtgagactctgaaaaacaaaaacaaaaacagaaacaaacaaacaaaaaccccaaaaaactctataaacctgcctattcagagtcaatttttatccttccacaatcatgcattctttctgcaactgctgaccaaggaacactcaaatgtgatgctaactgaatcgtaaatgcagaaccatctggaactgatggctgtatactcccctccctgctcctcttatggccccagaaggactctggagcatttgaccatcgatgacttctctgacttaaactgaagggttatctgtcctaggtttgtacagacatatcatttaatcttttctgcttttaacacctttctaatacagatttcaaatttactgaaacttatccatgaaagcaagttaaactgcatgtattttataaagaacttacattatataaatcagcagccagtttttcaatgtactgtttcaacttatcagctgttttcaagccatcttgaaagaaactacaattaaaaaaatcagagatttaccaccagtataaaaaaaaaagagtatttgtttccttatgtggaaataaaaaaaggaactataataacctacaaaatctgaaaatacacttatctgtatatatatactcattctctatggatttatctatacaagacagttataaaactaattacggcattttataaagatgtaccaacaaataaattatggctgtcagttgacatttgatagaagatatcacaaggacactggaaattacagttgcagtcccaaaacagtgatttcataacgtacatatgcatctatacatagaacagttcttcccagttaaaccatatttgaatttgaaggagagagaaggacacattaaccagtggaatatcatgaggttgatctggacactataaagagaaatatgatggaactacagataaaggcaggagaaaagtcaaaattcattcagttcctcaaagatccctgtgttccaacatatatttgaaacacaagaattcaaagcaataataccaacgggtttggaaagctttatcctacaacacatggttgcatgacttcacctgaaaaataacaagaattaatatctgtggagcatttagcacatgcccagtactgcactgaacactttacacaagtgatttcatgtacacaactctaatgaattaaagcacttcaatctcatctccatttgtaaaactgaggtacagagtatgtataaaacttggttaagttgcagctagtaagcagcagagctggtggaattcagatccaggtctgccagattctgatccacgctctttaccagcaagtgaagatttcttgtctcaggtggcacacttccactcaggaacccagtctctgatatcagtttagaaaaataaacaatatgcctcagaaaacgtgtttagaattttctctgccctattggaagcttctctaaccatgtccctacagcagactatttctcaaaacactatctgttttgctgtctccctacaaacaacgaggaccttgagcatgaggactgtctcatctccctatcacagtgggcccaacacaaagcagactgaatgaagcaatatcaagacattttaaggaatatcttttttttttttgagatggagtctctcttcgttgcccaggctggagtgcagcggcgtgatctcagctcactgaaacctctgcctcccaggtagctgggactacaggtgcctgccaccacaccaggctaatttttgtattttcagtagagacagggtttcaccaagttgatcaggctcgtcttgaactcctgacctcaagtgatctgcccacctcggcctcccaaaatgctgggattacaggtgtgagccactgcgcccagcttaaggcatatcttaagagacatattttaagcttaatatgtatattcagtgttcagtggcaataacacaggctattagaagtggccttcagaatgattactgaaatcctacaagttccaacattttttaaggctgacatctttggcaaagaaaccttattgaaataaagaagaaaaatactacctttagaaagtttttcagcaacagggatgagagataaaaatggccttttagttaaccatttaactgaaaaatacatgaacacatgtaaagcctcatctctctctctctctctcggcagggtctcactctgtcacccacactggagtgcagtggctcaatgaagcctagacttcctgggctcaagtgatcctcccatctcagccttctgagtagccgggactacagaggcaccccaccatgcctggctcatttttatttttgtaaagataaggttttgccacattgcttgggctggtctccaactcctggactcaagtaatctgctctccttggtctcccgaagtgctgagattaaaggtgtgagccaccgtgcctggcctaaacccttattttctagcatttgggttttcggcactgcctatagcgatgcaagtaaaacttctcagtatagaattttaaaagtttacgttctgacccttgaatacttctgttttatctcttaccattttcccttaaaaactccaaggtctagccatgctacattatttctagttgcctgttctttttcaatccatccttccccacttcagcctttgcatatgctattccctctgcctggaatgcccttcccctctatacctgtgtagtagtacgttcccatgttgctatgaaggaacacccaagacggagtaatttataaagaaaagaggtttaattgactcacagttccacatggctagggagacctcaggaaacttacaaccatggcagaaggcacctcttcacagggcggcaggagagagaataatgccagcaggagaaatgctagacacttaaaaaaccatcagattccttgagactcactcattatcaagagaacagcatgggggaaactgcccccatgactcaattaactccacctggtcctgcccttgacatgtggggattatggaaattacaattcaaggtgagatttgggtggggacatggagccaaaccctatcaacctgcctgccaaactctcttttatcaagactcagctcggctgctaccccataagcagtattctctagacctgatagtcaaagcagcggcttcattgagcatgtgggcccaggcctaagtgccagacctggagaggttggcaatgttctgcacagagcaggccatctataagtgttaacctgaaaccagcatcctctacatcaaggaagggatatatgcccaggagttaaaagtatgggtacaaagttaatcatagcaaaatctgttttggtctctgatactgcacttaagtgatttctggagaaaagttttgaaggtagagcatttaaatttaagatggatgttgtcaggacttcttacaacagaagaagcaatggctttggggtcagatgattatgaccaagaatctgtgttctggcaagtcatttaacttctcttggcctcagtttgctcatgtgtaaatgggcaaataatacagataggacatgtgaaactacccagcaaagtgtggggcagttagcatgtgctcaagaaatcattctcttccccggagctgcataactttatcatataaggaactgtttcctttgcagagggatacagattctttgtagatatttttgaaaaggtatttcattttcacttttaacataaagggaatttaatctttatgctttaaaaaaatgtgagttttgctcgggtgacaggtacaccaagatcccagaaatcaccactaaataacttatccatgtaaccaaaaaccacctgtactccagaaactactgaaataaacattttttaaaaataagagaacactaattaaatctcttcccaatttttttttttaaaggtgagtttcaatgagaatgctctacatctgtgttttccaatatggtagccactagtcacatctggctattaaaaattaaatgaaaaattctgttcctgaagactcataagccatatttcaagtgcttggtagccacgtgtggccaatgggtaccatgtagatggtaaagagtatgaacatttccaccatagcagaaagttctactggacaacactctagaaaaagaataagcaaatatttgaacagcacaaaagaaatactgaagaacacattataaattttagggagaaagacggaactgttttagtttgaaatggcactgataaaaatgaaaattcctgccaattacaaggctgaagactccaaacaaatttactttccttctgcttcaattattcagactgttacatacccagattctaagaaaaatcaatgtaataattgctttaatctgtagcataatcccatttttgtaaacaaaacaaaccagatacatgaatctagtaatcatctaagtgaggagattacagggttttttcattcttccttaacttcagtttctaatttttttcttaaggatatcacgtattaatcagttaaaacaaaattaaagagtcaacattttctctgggatgaacaatttggaggcaagccccttgcagaaagtaatttcagggagggccaagttctagttttggtaagaaataggagcaggaaaggaggacgagttgtagaagaataaaataaccatggcagtcattagcaatgtatcagtgacaccataaaaagcaaagggtgacatgctgtcatctgcactgtccctctgagcttcattctcttctccttgagggtcacagttccagctgtggacagggtagacagagagccaccacgacctgccaaaacatttcacagagggcagtggcttctctgttcctcctttctctcttctctctgttttagctcgtcctagttcagtggacatgcaagggctactgcacacatggctcatgcctgtaataccagcactttggggggccaaggcaggacgattgcttgagcccaggagtttgagaccagcctggacaacatggtgaagccctgtctctacaaaaaaaatacaaacattagccgggcgtggtggtacatgcctgtagtccctgctacttgggagactgaggtgggtggatcgcttgaacccaggaggttgaagctgcagtgagctaggattgtaccactgcactccaggctgggtgacagagtgagactctgactcaaaaagaaaaaaaaaaataaaaaggccgggtgtggtggctcacgcctgtaatcctaacactttgggaggccgagatgggtagattgcctgagctcaggagttcgagaccagcctgggcaacaaggtaaaaccttgtctctactaaaaaaaaaagaaaaaaaaaattagcttggcgtggcagcatgcgcctgtagtcccagctacttgggaggctgaggcaggaggactgcttgatgtttgaacccagtaggtggagggtgcagtgagcagaaatcacgccactgtactcccacctgggtgacagagtggcaagactccgtctccaaaaaaaaaaaaaaaaaaaaaaaaaggcttaggagtcaaaaccatatcatattttatattttggctctaaaccttactatacgtggtaaccttgggcagttattcaccctgtctgaataacagaatgctcatctccaaagtggacattttctagtttcaaggagcatcagatgagctactacagataaaagtgttgttagctggaaagtgaagcacatgtgtgagttctgactacctatcactacacttaacacataaatcttccaaatagaagggaaaattacctcgaggatgtctcatttatctcttagccactttctctataaattactgtaacataacaagatcttcaaaaaccagtaacagtaacagtaatggcagctaacatgtaactgagtatttactctgtaccagtcaccgcactattatacacaattcatggaatctctttttagtctcgttacagaaccaaccatgcaactaggttcagaactttcagccccacccctcctcccacctctggggagggcagaggggctggagattgggccaataaccaacagccaatgatttaatcaatcatgcctatgtaataaaacctctataaaatcttctaaacaaaggggtttagagagctgctgagttagtgaacatatgccatcttttgtgtctggcttctttcacttagcattaatgttttaaatgttcacccatatgtaacatgtatcaatatttcattcacattcagcattgtggctgaacaatgttccattttgatataccacattttgtttaaccttttatcaactgatggatatctgggtgtttccgtgttttgtttattgtaaataacgctgttataaatattcatgtacacattttatttaaataattctatgcttaactttgtgagaaattcccaaactgttttccaaagaagttgcaccatttacattcctactggcaatgcataggttgcaatcttcccacatcctcaccaagactttttttgttttaattacaacaatcccagtgggtgtgaagtgctatttcattgaggttttgatttgtacttaacaccgactaatgatgttgagcaccttttcacgtgtttttctggccatttgtgtgtgtgtgtgtacaatttttttaatatacagagtcttgctttgttgcctaggctggagtaagtcattatggctcactgcagccttgatctcccaggctcaagcgatcctcccaccttggcctcccaagtagctgggaaaataggcgtgtgccaccacaccagggtaattttttatttttattttttgtagagacagagtctccctgtgttgcccaggctggtctcgaactcctgggctcaagtgatcctcctgcatcggcctcctaaagtgctaggattataggtgtgagccagtacacctggactgttgttgagttttttttatatattctggatatcagactcttatcagaaaaatattttgtaaatattttctcctattctgtgggttgtcttttactttcttgataatatacttccatgaacaaaagtttttaattttgaagtccaatttatatttttatttggtttcctgtgcttactttgtctgctttgacacatttactaagcgtttattaaatgaatgaacatgactttgagcaaaatactgatcctttctgagctacaacttcttgagtgttgggaatattaaatgagaaaacacatgtaaggaacttagaggcagggcctatataattcgtcccagaaaataagctctcggtaaatgttagctattattcttattatctgtaaaatgacagataataaagcaatgtttataaatgctgttaactctgcaggtcataatgacacttgtgaggaggtaaaaggagcaggtgaactggaggatatgtctgtttggaaagcagcatgttcccgacaatgttcatgtctgaaattgagcagtaattagtgagtgagctgaaatgagttggaaacagttaaaagcccttcttttctgttccctttatttatttctccagtgtagtagcttcatccacacggaagtgtcgtgactattactacctaggcaaattcactgttgaataccagctgactttgtactgaaaatcactttgggaactgaagtaagtactgagaagaataaatcttaaaaacaaaacaaaacaaaaaacacctacgtagagaatgcttaacaggtccatacaatatgcctattaagagttttgaggaactgacagaagtagaaaagaataaaggaaactactctggcttcttgctatgatagagttcttggggttccaccatggagtaacttttagttgaatccccttataacatggttctactacttgatgtctcagaacatctctctccctacaaggtttttactgtgtagggttttcttctgatgatctctctctgacctaggggacattcgtctaccagattgcaatctggtaacaaaatcctagctatcctccaagttcaatgacaagtcccaccacctccttcaaggtgctaataccttctcctcagtcctcctggtcagatgtctctcttcctgttttttttttttttcttttgagacagagttttgctcttgttgtccaggctggagtgcaatggcgtgatctcggctcactgcaacctctgcctcctggattcaagcgattctcctgcctcagcctcccaagtagctgggattacaggtatgcgcaaccacacctggctaattttgtacttttagtagaaacggggttttgccatgttggtcaggctggtgttgaactcctgtaatctaataatccacctgcctcagcctcccaaagtgcggggattacaggcgtgagccaccgcgcccagccgtctctcttcctcttgatgctccatggtacccgtcactgtccagccccattatgattaataatggatctgacttacttcctatacctggacaattaactcctgagcggaaaagccttgctttatctctgtcccagaactgggcacagtagctgatctttggtaaaagactaatacatatttgtggaaagggaaaaagcaaagaataagagaataaagggaggatgcattagctatacaagttagcatcaccattactagcgaaggctaatatatgtatactttacaaagcatcttctattttgaaaaactcttgtttgtgtaggccaaactcttccttataaacttagagaatttaacgtgaaaatagatttctaaagtcaggtgaaatcagttttgctgccaaagtactgcagaattcaggagactgagagattcacttatttctttaaaactttcaaaggaattaaatgtttccaggaaaactaaatttgatgaaagataaaaaattccacccaatactaaaatcagggaccattagaacacaggccaaagtttcataactgcccaaccacactacaaagccaaaagtaagttagttaatccaggtcttcaataaacaaacttaatcttaagaaggtgaaaactttctacttcaatatattatttttatttttgaaagacacttatataaggtacaatttactttgaaaaaaagttatcatcaaatttatgtaaacaacaatttgatcatcaaaaaggttttccttaagagaaatatcctagacaataaaatatataaataaataattttaaatgccacttagaatcatcacagctgtcaacacatacaaggtcgcaggcactgggctaagcactccacatgcattctttttcactttttacagccttacaaaaaccctaaggtggttgctacagaatcgtaacccagcttgacgagtgagtatactgaggtttagtgaagtacctgattaagaatacagttaaccagctgcagagccaaaatgttgactcatctaatttgtctaacccaagctttgtgcttttgacataatattaatgctgacctccttaaatgtttcagttgaatacaggtatctttctaaatataactattgaaaagaataagaaagatcaaaggaaattatgaatttaacttttttgagagtattttatctagtccaaacgacctttacattattttgcttatgagagctgtccattccatttctggaaggtccttccattattttcggtataacttccatcaacgaatacagactttactaatacagactttacttttctggtagagtctccatgtgtagctggcacattttcacacacagactctaccagaaaacccatgaaagttaacccaataagtaaacaagcaaatgtggcaccacagaatcacaaacataacaaaaagatagccctgcaatataggcaaacaaaaatggtgccagtgtagaacaatggtatttctcaaaatgtaacacaaattatataggaatccatgtacaaatgcaaagtattcttaatgccccaactatttaaattcacttattttagatgaaacaaaacaaaactgaagactccaggtggaaatacatggtgcaaatggtgcaataataggccaaggccaaggtggatcgcgaggtcaggagatcaaggccatcctggccaacacggtgagacccagtctctactaacaatacaaaaaaaaaattaactgggtgtggtggcgtgcgcctgtcatcccaactactggggaggctgaggcagaagaattgcctgaacccaggaggcggagattagagtgagccgagactgcaccactgcactccagccaggcaacagagtgagactccgtctcaaaggaaaaaaaaaaaaaggcaaaatgccaagtaagagagtcagggtagggggtcatcagaaaggactcttcagtgacaggggatcatgcatctgtaataagagctccacaggcgatcaaatttaggaagaagtatttgtaagtatttgtcttcttgtaaggaagacaatatttttaagccctaatttgagctactgatttgtataaaacactgaagatggaagacactatttcttatccatttagctgaaaaaggtcattatatcactttatttagtcacgagatgaagaaaagatatgaagaggattaagacaaataatgaagtacagggggcagtaattgggctaataacaatgcttgcaatattctactcacttgcactgtgcatggtaatactttataagattctgcagcagatccacaccctttttggtcttgatttcattaactttaatgagatactgtgaaaataaaacagggttttgcgttgattaattccagatggggctcttcagccatgggttcaggtggctgaacatcacccctgaatctgcacaagttaccaagccttggtgtcctttagacagtttagagaatgctgatttcgcagtcacaaagtgttcaaaacaaattgactagagtgttagcattttataaattattttatgattagtttactcgacaagcagaaataaaacacagcaaaacattctagaattattatttccccttggtgcagtggatctcaaacgtatagtttatgtggtcaaaaactggaaagattgattgttttttgcagaaagtacgcagaatagcattctcatcaaagaatataccataggatattgaaactttaggaaaaagaggtgaatcagaaagaatttttactactcaaaaattaaagaataaaagtaagaataacccactaatttattgaggtaactaaacacagtagtgtacttgtactgtgcactggtcaagattttctattgacactgtttgctcacttgttttattctgtaaaaaggttcatgagcacacaaactcaaggagccaaagggttatgaaacagaaaaaagagagaaagagaaagagaatgagagagagagaggtgagaaagagagagagagaaagaaaggagagggagggaaggaaggaagggagggagggaggagaaggggaaggggaagggggaaagagaaagagaaggagggaatagagagagaaagcgaggaagaaggaaaaggaaaggagaaaaaaatctagggaaggaaaaaaatttgacaaagttctccactttaatattttctgaaaactgcaaaagaaactcttactcaacagccgtgtcagaacaggttggtttctaggtcaagaagtgttcatgttcaattggaattcagtttgagaaccactgctctaagtttaaggcagcatgctttttgttgcatttttcgtgaaatcgactttcttaatgacaacttcatttgagttttcattcaaactggacatatggttaaaaaaacatgctctaaacatacaccaataaaacttaatattcaccagtgttacctctcaccaatgttttcctcccacaaccactcacaagcaacattaaggttctcaccaaagaatcctgttttggcttaaacagccccatagggccaaggctcaaaatatgagacaacagtgcaatggcaggttcccaaaaggcttggagaaaaatggagattagaatccttaagaaacagtttcctctctaataatcaaacagagtctgcctttaagcataaagactgctgactagcaggaaaagatcacagttgttataattctaggcaaatggtggaaaagtccattcttacttcacacatttggagctgaaagaggcgcctttccttctccatttcttccgcaatctcagctcctgttatctctgtgcggatcatcccatgttgttttgcgtgctctcttttctctttctcaatttttgtactgtaattaaagccaatgtcattatttaaaaaaaaaaaatacactcatgtacaataccaacagcagatcctaatacaaactatggatttggggtgacgatgtgtctatgtaggttcatcagttgtatcaattgtaccactctggtgggggtcagtgataacgggggaggctgtgcatgtgtggggggagggagcatatgggaactctcttgtatcttctgctcaagaaggaagtctactaaaaacaaaccacactcatgtcttcccgttaacaaaagccactgattattaattcctaaagttaaaaggcaagaattcttaagttggtagaatcaatcagaagtaaaagcctacaatcaaacagaacacaaacactgtatggattttcatatgggaaacctcttacatttttcctttgatcttacacatgacagattcatatacattctcttaaattttggtaggcatgaagaaattttgatagtttacctactattgggtaaagcactttataataaaaaaagaatcagaaagttggagacatgaggctttccttgaatatcgacagcttgcaagacttcaattatttcaaataattaaagtatataatgggtctttgtgggtatgcacaaaatttagtcaaaggtaatttccaacattcctctaaacttgagctatttccacattccaagaatacattttaatcagtcaaccacttgtcactggaatgtacaaaattcagaagaaatcctaatttggaatcctatcacaatgttcttctgtgtgtggggagggggccaggggaaacgaggtgataaagaagaaaggcccacattaaacatacagtagctgacgctagtgctcggctctgatagatgatactctggtaataataccaaagattatagcctgctttccaaaaatcattaacctgaaaatggacttctaatttcagaaacaacctgtaatttctagctgtgaatgcaaagactaactgatttatccgtcaagtcttctttaagttatggtggtggtaggggaaaccaactctgaagaaagccaacatccttacctatacacagacatagtggaaaatccaccgatcaagccaatgaaaaatctacttataaacccagtcgggattgactctaataccctaatgctattatatttaagaaactctttaatcatgccaccttggcagtcgaagaggcataacagggattttaacagaaagaataaatctcagctctttctccactgatgtgggtgggaagagaagaaatatggagggacaggcataacttaataataagcctttcaatttaccatggtgacttaaacatacatgtctttatttcttcttcctccagtgatcccactaaaatgagagtaaaggcataagaacagataatctcccaaagaaagaattgaagacaaaaaaggatgacggaattcaataaatatttggaagagcaaggctgaagagagaaggagagcacctcaaactatagggttctctgtctccctcacttacatagcttccaaaatgccaccatatgtgattactaagcaggagcgtgaaagaactgcaaggttctgagacaaacctcagacactgacatttggaaaacccctaataaaagagctgccttcacatcctaaaacttgaaacctaaaaagaaggctttctgctttcttggagaaagcagatctctaatgatgcatataaacttttagtctttgggtaccttgctctgaaatatgaatgcacccaaagattataagtctccaaaatgaaagtgagagtgaaagtattaataacaaaagggggagggttgggaaggaaccagaggcactaaggaagcagataaaacattttacaaaatgtcattaaatcttcagctaaaatattgcatctatgaaacaagaaatagaaactataaaaaggcaaaaaaaaaaaaaaaaaaacccaactgagcaaaagagctcttagaaatttaaaatgacagccaaaataaaaaagctaactgaaacagtggggaaaaaacactgaaaaaataacctaaaatataatataaatagaacagaaaagagaagaaaattttaagaactgtctaggaagtcaaatattatataatgaaaattcccgaaagaggaataaaagaaaaaacaggaagaattacaagaagtttccaggagtgatgaactcaaacttgtaaacagaaagattgcaaacagaatgcacataccgtggcacttgaagactcttcgtaaaaccttttacagagacaagaccttacattctctaaccaaaaataaatgcaacaaacaacaaccacatatcacatacaaataaatgggaatcagaaaggtatcagatttttttttttattagcaatactggaaagtagaaaacaatggaacaatgccttcaacatttagagataaaattattattattattgttattatttttgagacaaagtctcgctttcttgcccaggctggagtgcagtggtccgatctcggctcactacaacctctgcctcctgggttcaagcgattctcctgcctcagcctcctgagtagctgggactacaggaacccgccaccacgcccagctaatttttgtattttttagtagagacaaggttttgccacgttggtcaggctggtctcaaactttcgacctcaagcgatttgcccaccttggtttcccaaagtgctgggaccacaggcatgagccaccgtgcctgaaaattattataaaatcagtattttatactgatttaccacttttataaaaatgatttataactatcactttttgtggtggcagaatgaagatagttttggaaacacaaaacctaaactctttgcctcctttagagctgttctctgaaaactactggaggtaatgggccaccaaaatatggaactatactagtcaagaggaattagatttaaaactaaagagagtcaaacgccatcccaggatggcagctgtactgctgatctaaagagctctgcaaagggatgtctccaggaaagaagaagctgacacaatttaatactaatagatatataatcatgctaataaaatacataatgtactttataaacagaaatattattgacaggtgtctgacatctgctagagcagataagaattcacagaagattcacacagaactaagcaaatgaagaaatgaggccattatgtcattaagaaaaagtaaacaactgtactctaagaacagaaattcaatcctattctaccattcagattagcaatgaatgcttatacctataaaaatgtaaacactgaaactagtttaataaaaattgttctattaaccacaatggatgaacaagggtgcgaaagtgatggggtgtctatgcaagggaatgtaatcctcgtctaccacagcaatacatcacagctaaagctagaaagagcaagaaaatactgaggaacgtgtagataagtcaggaagcaggtaaaagagttggaaaaaggggagggactaacaggatcaagaggggcaggcagaaggccactgtgtttccattagaagcacatttgttgcctacttaatattttccctgtcatgatttgtaaagaaccctgtaccattaggtatgacataaaatcactgagtttagattgtggaggacaatacagataagtgagaagtgctacaaagggtacctggtccatcctagaatgctctgttctatgataaactttaacaatgttgaagccactgttatttggggtttccattacatgctgacagagtaagtcttaactagtaaaagcactatctgatgttttagtttacgtacatttatcactttgaccaaatgaaatttgattcttaaagagaacttagtagaaactatttattgtgtgacttccctatgctaaacactgtgacaactgcttcaacacactaccttatctcgtcctcacaaaaaccctgagaagtaggtaatttttatattattttacaagtaaggatcatcaaaattaagtattttggctcaatgtcacaaaactggtaatgatttctaagtctgtgatctaaatcattacaaacttcactgcctccagagttccaaatagaagaccacagaaaatgtccagccttctccattatcaaaactaataaatgaacttttttgtgtggagtcattttgttttctctaacttataacagcataagtcccagtacatcaaagagacaaatgcttgttttctttctttcctgcaccactatactttagtgacaaagaagtctatctcaggaaaattgttgacagggatttactaagcaaacaaacaaaacctgccttcataaggtcttaaattcaggaggcactcaacttgctattcctgttatacatttccaggtctgaataattcttttatttcttcaatgaaatagtacataaactatgagtcattaggcactggtagaataacaccatatataagaataatgtggttgtggtcttcaccaaatttagattgtagaggacaatacagaaaaatgaacagccaggccgggcatggtggctcacgcctgtaatcccagcactttggctgaggcaggtggatacctgaggccaggagttagagaccagcctggccaaaatggtgaaactccgtctctactaaaaatacaaaaaattagctgggtgttggtggcaggcacctgtaatcccaattactcgggaggctgaggcaggagaatcgcttgaacccaggaggcagaggctgcagtgagacgagattgagccactgaactctagcctgggcaacaagagtgaaactccgcctcaaaaaaaaaaaaaaaaaaagaaaaagaaaaagaaaaaaaaagaaaagccagacaagttcatatgttgagtgagaagtacaaggaagagcacctgtaccatcttagaatgctttatattctaagtcatttataatactaagcaccagatacttctaggtcttcagccaacagagatttaaaaaatataaataaagttgtactacctaatattggtagtactttagttgacaaagcacatattacatcatgtttcgttgttcctatatcctacaaagaagacatattctacaagtgtagaacaaggtttttttcttccccctttgtccttccattttctaagtacttaattctattccattccaagttcatgcactgttgtctctgggcagcggcagtacttcgcttacaagttgagtactcatgacccacttttcatacagaaagactcatagcccacagcattcatttatcagttgaccattttaagaacgtttttgttctctgctgcatttagaactgtcaatgtacggatatattcctaagacagcaagtccctaacaatgcacttttcacataattacaaaagtagtttgggaaaaactactttttttaatcctgaatttgtttttcttttgcttgtttttatcctgctgctattgctgcctacagaaatgttttattctcttatgtttatagttgtccaagacttttattaaaagctttaaaaatacatatctcctcccaccccaccctactgcttggtgttacaaatgtctcagggtaataataataaaggaatgtggtatgatacacacagtatcgagatgggccgagcaccctgcaaagtgcttattgtcctaatccctaacaagaactccacgaggttggtggtctgacttcagtgcccatgctatgctgaggctctgtggtcaagacagacctggagtgaatgctagctggacacataactagctttctagcctttcatgagccccttagcctctccaggtttcagtttccctgatgtatataaacagagagtaaagctgtacagatagtttcctgtgaagaggtcatacatgcaaaaaacacttagtgcacgtcctggcaggcaccaagatgtcacagtattagctgttacttctattatttcccaatttttatactatacagaaacataaatggtccataattacatgctatctataatgagagtcatagccctataacttgatagtactagcagccataaatgcgagaacaactgatagtaaaagtacctctcccttcagacaaatagcacaggacatgcaaccactttaggtcagtgtacccaacctcttagccctaataaggatatgctagaggatatactaaacaggtttttgttgagaagttattagttaagggctctgtcctttttccagttaagtttttttttttgttgtccaaaattcacaacaatattaaaaaacaaacaaaaactctaaacaaaaaaccacttacaactttgtctcataatctttccaggctttgtcaaatggcttcttgagatccttagaaacgagaaaatgagattaaaattgcaactacttttgctgaaaattaataaatagttttgaaatgacatcttagcaagaattgtttcctttataggacactgggaacttcactttatgcacgttacaccatttttttttttttttgacagggtctcactctgttgcctagaatggagtgcagtgccacaatcacagctcactgtagccttgaactcccaggctcaattgatcttcccacctcagcttcctgagtagctagaactacaggcactcaccaccacccctggctaattcttgtacttcttctgtagacatgggggtcttattatgttgcccaggctggtcttgaactcctgggctcaagcaatttacccgccgccatggtctcccaaagtgctcagattataggcatgaccactgtgcctggccaacatcaaaccatgtgttatatacacaagaagcctgagagaggaaagaagggtaagcgccctggtcatgctgatgaagcaggagcccgaggttcagaagggctgggtccccagtggtcacactgtgggagccaagactcgggcttagcttctctctcccacccatggaggaccttcccaatcttcttgaaagtgcctaatctcattcctctgtcaataccattatgtgaagaggcacattttttccaatgatcattttccaagagcatttttaacgctgaaaatgttcaaagagtctttcaaatacaagtactactatgatcttgaaagaggaaaaaaaaaattaatcctttcaagttaaagtgaaaatcaaatttctgaacacttactcctttgactccctttaggtctccttttaacaaagaatccaaggtgaagatcacattgtggctcaaaccctggagctgaaaaagcaaagggaagatgggagatggttaaaaaataaagtccacatgaacaataaaaccagctactattgactgagcattttccacacaccaggctctgttgaagggctttccatgcattatttcattgaacctacatgacacctctgtaggttaggcgacacaattatcactactttgcagctgagggaacagaggtggagtcatttgtgcagaaccataaagcatgtgagtgaggagctaagatttgaatttaggcagtgtaggctgggcatggtggcttacgcctgtaatcccagcactttgggaggctgaggcaggaggatcactggaggtcaggagttcgagaccagcctggccaacatggggagacaccgtctctgctaaaaatacaaaaattagccaggtatggtggtctacaactgtagttccagctacctgggaggctgaggcaggagaatcatttaaacctgggaggcggaggttgcagtgagccgagatcaccactgcattccagcctgagtgagagactctctcaaaaaaaaaaaaaaaaaaaaaagaaaagaaaagaaaattgaatttaggtggtgtagctccagagcttgtgttcttaaacactatactacagtacacgtatatgtgtacaaataattcctcaaatcattttagcacttccattaacacctctgccaaaattgtagctcttacggtgaattttcttcaactgcttctgtcagagtaaggagggcttttctcatttccttttcacatttttttatagcatgtatcattatctgaaattactgtgtttggatttttttttgctcagatttatcttttaatttttagtttttatggatacataatagttgtatttatgaagtacatgtgaaatttgatacaagcgtacaatgtataatgatcgaatcagggaattggggtttccatcacctcaagcatttatcatttctttgtgctagaacatttcaattccactctagttattttgaaatatataataaaaatcattaactacagtcactctgctgtgctacctaacactagactgtgttacttctatctaactgtatttttgtacctaataaccaatccctctttattccctcctccccactatccttcccagcctctggtaaccatcattctattctctatctctatgagatcaatttccttttttagctcccacatgagacagaacatgcaatacttatctttctgtacttggcttatttcacctaacataatgttggatccattttgtggcaagtggcatgactttgttttttatggctgaataatattccattgtgtatatatactgtattttctttatctactcaactgttgatggacacttaggttgattccgtatcttggctactgtgaatagtgctccgatgaacatgagagtacgggttatcttgttgatacactgatttcttttcttttaggtatatacccagcactgggattcctggatcttatggtagttctctttttagttttctgaggagcctctataccattctccatagtggttgtactaatttatattaccaccaacagcgtatgagagttcccctttctctgcatccttgctagcatccattactgttttttttataaaagccattttagctggcttgagatgatatttcactgaagttttgattcgcattcctctgatgattagtgatgttgagcattttttaataaacctgtgggccatttgtaggtcttcttttgagaaatatatattcagatcttttgcccagtttaaaactggatttttttcctatgagttatttgagatccttatatattctggttattagtcccttgtcagatgggtaatttgcaaatattttctcctattctgtgggttgtctcttcactttgttgattgtttcctttgtggtgcagaagctttttaacttcatatgatcccacttgcgtttgctcatttttgctttggttgtctgtgcttttgaggtctttctcaagacatctttgctgagagcaatgtgctggagagtttcccccaaagttttcttctggtaggttcacagtttcaggtcttagatttaagtctttaatccatttggatttgatttttgtatatggtgagagatagggtctagttttattcttctaaatatggatatccaattttcccagcaccatttattgaagaggatattctttccccaatgtatgttcttggtgcctttgtcaaaaataagttgactgtgagcatgtgaatttatctctgggttctctatttggttccactgatttatgcatttatttttatttttattttttgagacagagtctcactctgtcgcccaggctggagtgcagtggcatgatctctgctcactgcaatctccacctcttaggttcaagcgattctcctgtctcagcctcctgaatagctgggatcacaggcatgcatcactacgtccggccaattcttgtatttttagtagagatggggtttcaccatattagtcatgctggtctcaaactcctgaccttgtgatccaccctccttggcctcccaaagtgctgggattacagacgtgagccaccgcacctggcctatgcatctgtttttatgccagcatcatgctggtttgattactacagcttagtagtataatttgaagtcaggtaatgtgatgcctccagcttgtgtattctgtctccctcactagtacataacctcgatggggacagggactttgacttttctgttcacagctatatccttaatgcctagattccattaaaaagatgagatatttaggaagtgcaatctataaccgggaaatagtttttttttttttttccactgctctgcggcagtggcctgagtctccttgattttaagatggcacaaagaggaatctacaaaggagaaggaaatggagatggagatgctacccagctgcagagaagaatggcaggagggaaccaagggaggcagagtcaggtgtgaaaggagtaaccaaaacaaggactgagaagagtttttacctacttgtcttcaaggagaccccaagtaatcttggtaaaatcaagttttagtaggtgtggaacccaagactgcagagacctgcaggagcagattatagatggaaaggtttgtgggtcccctcactcaagaaatgattttactcacacataagtgtattcaactgtcagcctgtccatccatccatcattaataagatatctactctgtgccacacactacactagaagcttgataggcaaagatgaataaacactgttcctacctgtggagagctcatattctaggaacagaggcagtcactacacagccaactctactacattatgctattatgtattatgtgttagtggcagagggagagagtggtgtgagaaggaccaacgctgacttgaaagggctttgtgcatgaccctcttaaccacatctgtaaagtagaatattataacctactgcaagcagctgttgtgaggatggaatgaattaatatgtgtaaaaagtgctagcttactccctgatacctaggaagtgttgaatacatgtttatattttaaatgctatggcatgctaaatatggataagataatgagggagcagagaggggcggggaacaggttttcccctttttgctcttaacttcttcctaaccctttcctgttgttttcatcttaggcttcttgaaattctcagtcattctacctctttactctccctgaacaacaactaattttacacaccggaaggtttcccaatgtgtgtcaccagagggcttctctggtgacacacatctaagaaacaatcacttctttcttatttcaaagacaaagggatttctaccaagacaattctgtctgtgattttgccaacaatcacacaccaacagactggctggcataccagagagctatagtctgagagtctacattctgtgaggctctaagacactggttcttggggagtggggcaaaaaataaaaaaccaaaaaatcttagctgttataactgtctgtggccctccaaagggccacagtatataactgatatcaactatgtctattagctgtattaaaatttcacgggggggagcgatgggggactatgtctaaaaaggctcttggggaaaaggaggaaggctttggatcataatgaggaaaaaaaaggttgagcaacactaactgggtctgagactgaaaatatgaagattaataggactcaccctctattctacacagatagctgaaataatttgctctgagtcctcaatttcattcttggagtacaattccctagcatcctcctatcctatgggccttagaagtttggatggatggtgggtaagtaaggttggggggcctgacctgccttcactagccaagccattgcctacttttcctctgttcacggagatccttgccttatttttcttcaaagcacttaccatccctacccatttgtatatatgtttgtttccctatttgttgctgtctccccagcctggttgccagtttgagagaggggtcaatatgctcactgctatattcccagaacactgcctagcacagagagggtgctcaaaaaatacttgcagaagaaatgaaatacagaatcatttgtgtacaaagttcttctctacagggctatctataactgatggaaagttacgtgcctatcaatagggcactggctaaataaattacagagtttctaaacaacagccaaaaaaaacgagaaagctctttatgcttcactttgaaaatatctccaagataaatatttatgtgataaaagcaaggtataaaacattacttatggtatgcaagaatttgcataacaaggaggaaaaaaggccaggctcacacctccaatcccagcattttgggaggccgaggcgggcgaatcacttgaggtcaggagtttgagaccagcctggccaacaagatgaaaccctgcctctactaaaaatacaaaaattagccaggcatggtggcacacatctataatcccagctacttgggaggctgagacaggagaatcgcctgaacctgggaggtggaggttgcagtgagccaagattgtgccactgcactccagcctgggtgacagagcaagactccatctaaaaaaaaaaccccaaaaaacaaaagacaaaaaaaacccccaaaaaactctctgctttaattatttctgaaataatacacagaaatctgttgataccaatttcctccagggttggaaactgggcaaagaaatagggtgggagaggagatttttgcattttaaaaaaattgtaatatgtaatatgttgtttatttaaaaagtcaaaaatttaaaacaaaatatgaaaagacagtgattataaataaccccttttcaactctttgttccaaattacggtttgcatcaatgcctcaaatcctttgtgaaatgaagcagcaaattaaaaaaaatacattaatgttattagtaccttgatctgaaaggctgtattataaaataacaattaaagaattatgaaactctgtggttagtactgaatgtgcaggttgttccaaacaaaaagtgcctcaaatcatgtactgaccacacaccaaacacaaacagtaaatccttttttttaaaaagcagatatggggtcttcccttgttggtcaggctggtttccaactcctggcctcatgtgatctgcccgcctctgcctcccaaagtgctgggattacaggcgtgagcaaccatgctccgccacacatagtaactttttaatgtcatcattgtggttaggcatgaggggaagatagaaaaccccaagaattaagaatttctccgtggttatctacacacattcttgagggctgataagaaatcatgaacgcaaaacatgttattatgaattcagaatgttcccagtgactagtcaatgaaaaggctacaggaaaaataaaatttaaatttacaaagtctttccaactaacttcccaggaaaacgtaggttaattaaaaaaaccagcaacgaaaattttaagtgacaagtgaatagtaattacctttgtcattataaaggcacaaagaaaggttaaagagaaagcaaaccaatctcaagaggaggaaattttaggaaatattcactggggggagcaaaaaaaaaaaaatcctttcttggagatctcaaagaacagaaaacctattctctcagttattttaggtgattattgtgccacgaagatggagtatatgacttcacagtcatgggattctacaaatttcctgtgttttcacttctatagttctttcaggaatcctttatattagcagtccccaacctttctggcaccagaggctggttttgtggaagacagtttttctacagatggcaggggttgggggagctgttttcaggatgaaactcttccacctcagatcaccaggcattagattctcataaagagtgttcaacctaagtccctcacattcacagttcacaacagggtttgcgctgctttgagaatctaatgtcaccgctgatgtgacaggaggtggagctcaggaggtaatgcttgctcacccaccgctcacctcctgctatgcagcaaggttcctaacaaagacaatgagtcagcaggggttgggggcccctcctttatatgacctgagcaagagttttgcaaactgatgtgtaacagtcatctccaaggcacttacaatacagccgacataatacaataacagtatcagtaaacttcctgtatgaccttcattatcttcaataaatttttaaaaaagcttttcaaatccattatataattatttcccattgattttactaaaattctattgattactctatctccatttactcaacttccaaatcatttcctttcctttattcattaagttgaattaacataagttctttacatgattcaagtctataagaagtcgaagggtatgttttttaaagtgcatttttttcattttattaagcaaacaacacatttaaaatcatttcaggacgaggaatggtggctcatgcctgtaatccaagcaattggcgggggccaaggtgtgggaactgcttgagcccatgagttcaagaacagcctgggaagtatagcaagactccaccatctctttaggaaaaaaaaaaaaaaaaaaaaaaagatgagctgggcatgatggcgcacgcctgtagtttcagctactcaggaggctgaggcaaggactgcaagattacagtgagctatgatcctgccactgcctgagtgatagagtgtgaccctgtctcttaaaaaaaaaattccagaatgatatttaggtatggtaaatatttttgctttctgcacaaattgcttctaaatttctttcctcaaagaagaggtattccccctgctagtacatacatcaagcctaaccagaaatttggagtaaatcaaacagagggaggccgaggtctatctttcattatgcaaaaggggcttaaggaagcaagtgactgtaattaatattaaactggacaaaaatagccgtttattccttacaattgcttcaacactgccagcagtatacaaatagcccgttatcctagtcactggagatgacttcataaacagttttccctctgtatatataaacatacatcttctgctctgatttttaaaatgtctttatgctttaccactaaaagaaatgatctcacttattgtttactgatttatcatctttcttcactagaaggtttgcttcttaaggggaggccctgtatctattttgtttactaactgatcagatcccaaagaaggaatcaagaagcagttgtaggtcgggcacagtggctcacgcctgtaatccgagcacgctggaaggccgaggcaggcggatcacctgaggtcaggagttcgagaccagcctagccaatgtggtgaaaccccatctctactaaaaatacaaaaattagccaggtgtgttggcaggcacctgtaatcccagctactcaggaggctgaagcaggagaatcgcttgaacctgggaggtggaggatgcagtgagctgagatcacgccactgtgctccagcctgggtgacaagagtgaaactccatctcaaaaaaaaaaaaaaaagttgtaggtcacactgtactatcatttctggcttgcctgaatactgcccaactcagctccaagcccctctatgggcctgcaggtggagtgcccttaagggagggctcaccccaacaagccaccctgtcctgctggagcagccaactggcagaaagacagtcagtcagcagggcctcgttttttcttgcctctgacagaagagcagagcacagctctacaaatggtacttccaggacacctacatgcacacaagactgtattaattaatgaggacataatttgcttgctttgtcatcttgcattaatcttgacattccctctccactgcccattggttctctctctctccataactgaaacagtttctctgaaagtaaggctaatgcaaatctgctgacttgctcaacgcattggaaaatccaattaaaataatgagccagctcccagtagttaagtctgcgattccctggtataaactgggtattctgtctagtatattaactccttcatgccctacagagttataataccttgaagctatttaaaactggtgcctcctgaagtggcaggtcaaaaaataaaactaaataaaaataaaactgatgcctcgtcattaggctgctttccaaggtactgtgatacagagcaaagaatcccagaggcatgtggccactcatcactcccggcctgcgtgaactgggaaaaccgtttaaccttgctggtgtcccagcaccttcctgaactagcccatgccagtgtcagtggatcgagacagaactgacaccaacgggccaggtgcagtggcacatctgtaattccagcactttgggaggctgaggcaggtggtttgcttgagttcaggagttcgagacccgcctaggcgacatggtgaaaccctcatctctacaaaaaaatacaaacattagctgggcttggtagtgcatgcctaaacctcagctgctcagaaggctgaggtgggaggattgcctgagcccaggaggttgaggctgcagtgagctgagatcatgccattgcgctccagcctgggcaacagaatgagaccttttgagacagaacagactgtctcaaaagaaaaaagaaaagaaaagaactgacaccaatgaagctccactttattccaggccacagaggtggctcgttttacacacagtctcattagctgctcctggtaaccctacaaggtattactaaataacttggccaaacacacgcagttagctgagacacagtggatgcaaatacaggcaaaatgcctgacactactgtagggcaagtgccctgatagcagtaacttaagcacacccttagaatgaccctgtggcagatgcacctgaatgtgtgttctgagttagggaatcccaggagtagtaatcacagaaattagttccttgtctatgagaaacgtccaagtccccggcccgaactgtggaacacaggccatacagaagattgaggccctgagttttgggttccatgaaggttgccagatggaagtcattaaggggagtgttaagtgaaaatcctatataagctacgtgctgttcactagtgggtgaagttttcttgttcagcctgctgccactggactctctcccctgtatgtaagcccctaatacaccccatgtctcatttgctggctctgggtcttttcttcggcctcttgaacctggtgccttccctactgaggctaggggtttggcacaacaactacataataccccttaatcaaatttaactaggtttattttcataagatttttttttttttttttgagacagagtcttactctgtcatccaggctggagtgcagccttgctcactgcaacctctgcctcctgggttcaagcgattctcctgtttcagcctcctgagtagctgggactacaggcacctgccaccacacccagctgatttttgtatttttagtagagacagggtttcgtcatgttgaatcataagattctttacacttgaaaagctcagcagtagtggtgaaaaaatgataatgagctggcatttcaggtacttttaaggctgggatggggagctccaaaatttcctttttattgcaccacattctctccatctcacagttcctgcctccctgcctcgtctgcaaggcagtctccataaactgtaagataatgcagcccattatactgtgttctaatctaggcagaacagcatgaattttatttaaatgacagagggtactgtatctaacatatattatctaaagatattgctcacaacacctctgtaagatgggtcttagtctcactaggttaacgaggaaacaggcttagagaggttaagtaactcgcccaaggtcaaacagtgagtaaagcagatgatcaggttattaattaaggtttttactgactccaaaggccactctcatttcctctgtgctctgctgttacagcgatcttttaaagtgattaccagattatatcactctcctgcttaaaacccatcattggcttcccactgaactacactcatatccaagctcccaatttagctctggccctgccaacctgttttgagtccctctacccattctcactgcactacaactccttttggcttctcaacccacagagatctctcccactttgcacgtgctttactctgtctggaacactcttcctctgtctccatgtcactttctcagtgaggccttgaccattctaaataataaataagtcccttctccctaacctcctgttactctggaccagtggcagaataggctcactttcacagagtactgcactttacaattatccgtgtgttcctttactgtctagagcaaagcttcttggaggcagaggctatgactgctttgcccaccattgagctacatcaaactcctagagcaaagtgttgacttgttctatacaccaaataaaaatgcttactgattaagtaaatggatgaatgaattcctctccaaatcagaaggactgctctgaaacatcaagtgttatagaacctgaaccagttttggtcgtcctggagtgctcagcaccagaatgggggaaggggctagattcaggagagggacagaagagttagaactgctcccaggatatggttgggagtgacaaaccaagggtacccctcccatcctgcagctgttaggctttgtctggcaagaagagaagaaagaatgaaggtcaggagacctgttctagacttgaacctgtctccaaccagctgtggatgtttaggcaggtcactttttgtttctggcatcaataaagtgtgaggtctctaaaaagacctctaaggtaccttccagttgtaacactcttacagcttaaaatgagctactgagatacaactgaataaagcagaaaaaattccacctcaaatgggtgagaactatagggagatgctcaaactgcctcagagacagggcagccctggtccccaactcaacaaagtaacaaaaacaaacaaacaaacagttctgtggtaaagccggagagttagaaaagtccattcataattcttataacaattctcaattttttagtatagtccatccacaatgttcactatgaaacttctggcacagtataaacataactttttgaaaaagtctgaaatatttcaacaaagtgagcatcttaatttgatcagagcaaggcaccaactatgacctaccagggccttgggctactggcagttttcccccacttcttgactcttaaatgacagggaaggaggagaagcaaaagcattacaaactgaattaatggagtaatgacaaccagtaactaaataatatataatcatgagatgtgtagagatttcaaactattacattttggacagtggtaaatggaaacaatagaaatattcaaaacaggaagttgggtaaataaattatagtgcaaatataagatgggcattctatacagtttttagaatgtgcctctgggttctgcagacccctcttcggagactgccaggggtaatgggggagaggatcctttctccaaaccctgcacaaacaagccttgatttaagaggttgtatggcttccaactaagcaaaggttcttaggctgcagtattttacaaaacaggaaaacattttcaaaatgttatcggtggaaaaccacagtataaaatagcactgcagtatgaacccaatgttaaaaaaattatatgactttaaaaatacgagaaaaaagatgtttaaacagcaaaaagtttagaaagacagagggtgtacacacaaacacacatacacacactccataacagataagattactgttgatttttattttagtctttttctccctacattttctgagttttcaacaatgaagtggtattatttttgtacgtacaaagttattaaaaagaaacatgatgcaaaatcacaagagggtgatataattaaccagcagcctatttctcattcaacttgttctttattcagtgataaagatgtaaatcagatgtcatgtataaaagtaaaaacaattaatataaaagtgaatctggagagaaaaacagttgcagcttctccgtaacactaggaaattctggatctctgtccagagtgacaatccttcctagtggttctcaaaagtgtggtcctcaaatcagtagtgtcaatatcacctggaaacttgttggttatgaaatcccagacctaattaatcagaaactccaagagtgggtcccagcaacctaagttttaacaagctctcaaggtgaaatggatgcaagatcaagtgtgagaaccactgccttagactaaaggctgtccaagtggaagaaaaaccaaagttcctttagagaaggaaagacttacagccagagagcagaaatcacttgcctatggtctaaggcataattacaatgaagaacagaggtactgctctggaagatctgggaaaggcccaaggaaaaatgcaagacaaattacaccatgtgctaaaggcactcgggactgacaagactgaatttactcataaagtacattttactggaaatgctagaaagaaaaatgggtaggtctaagagtaccagggaatatgagaattccttaacttaaaataatgcaattatattttatctaattcaatttagtaaatggtgggttagatttaacatcatctcctacatcaagtgaaaatgaaagtaccatttccctgtgcattatctgcagcatctgatttcatttgacgataattatatggaaaggggaagtagctaggatttataagaccaagacaaaggagaaagtaaaaggagggggtgtgctatatggctaggccttggtttgagaaagatatccctatcctaaggatttctttgttgtacttaaaatgataatcagttagttcatgatcaactttcagacctttaatttcatttccacgcatggcatctacaatttgttctttttccctagaataaaaccacactgtaacatcggatcacattttccttgctttcactcaacatctttatcacagattatgataaatgttttgcaatatcttttactcaggacacaccttcttaacacaatttaaaaaattcaacaaacatatgcaagcacacagggcttaccacgtactagggtgacatagtaatgtctcatagtagacattattgtcttcatttaactgacaggaggtcaaagccatctctgctccctttgcttggaaagccctgccctgtctgcttggtctacatcttcatgttttaagacttatttcacttaatcctcattaaatttttcagaagtcaaagaatccacctaaatggtaactgtgataggcagttgtttgatatatttcaaagcttcccttgcagaaaaggaatcttcttagatattacatttgtgatgccagctgctgccaggaaaccccacttgtgggaaaccaaaagcacaatgttttaaaagtctggtcctatacctttgtccatctttccttgtaaaattaagtagtgctttagggtaaactattaaaatattatgtataagcaatctctcacatagaaaatgacagtcttagcacagattctggaacagagtgggcacttggtaactgctggcagagataagaacacacttcataggaagtttctttcttactactaaagtatagactttcacctcaccctttatcaagtatatcaaccattgcttaatattatttaatgtttctacttatgaaaacagtctctgctagcttaagagaacagcgtttcatgaatatctcttgataatttacggctcagataaagggtacctcctctgtaaagccttcttagatactcttgctttctagaggaatgaatgagtgaatgaatgaatctgcctcaggtgacctagcttgggaggtggtggagcagagatagaactcaattatatccaacttcaaagtcaagctatttctgccaattttctgaattttcagttgcttaacatatctgtggcaatatgtcaatgaaaagatccactcatttttactgaaagatgtagtcagatactagttcaagactgcatcagcgggccatttcttcatgtttaaccctaaggggttaccatacagtataatctaaaatgaaaagaaaaggggaagtggcaaccagcttaaaaacaatgagaaattacatactgaaatataaattagaaataaattgttggagggcagaagtgaatttgaattaaaaaaaaaacacacacaacaacaaatgaaatggatcacctggtccagcaaaacatctaaatcagcattttctgaagtggttccatgaaaagtcaatgtttcttatacaacaacaaagtccatgctcaaataaattagaaagcactgcattggacaagtttctttatactcttgctcccaggcaagaagatgccagatgcactggacacagtatggccactgtgtacggctgtgcagggtgtacatggctcaaagcacccacctggcttgtacaagggaagcctgaagtccagccatgctcccctcactaacccgtgtttcccggtgctggctaacatcagccctgaaaaaagcaccaggctgggctgtaggacctcccaacagtccagatctggagtggtggccttgtctgagggccatggtatgtggaggtgaggagagactcaggcaacattgtgcagaggaatccaaagtcagctcaagacagaacatttaatctgaatcggctaggaagagtgggagatccagataaaaggttatgcctgggatggaaaatgggaaatcaaggaatagtggaagggaatgtggagtggaaagaagtggaagaagtgaatgtggggcagagtttgacagaattttctgttaagaaaggaaaagagaaaaagacttgcatttgctgtttgcaatgtacttccagatctgggcctaaagaaagagctctggaggcttctgggacaaagatcatgcagacagaaggctgttaattctctccaatcagtgtttgccttatctttgtaacatcattgtctatgttttaattgctgttttttaaatcaatacaacttttaacttaaattaatttaaaagtaaattttacattatgtccaaaacaggatgtccatatcttttgcgaggaggtacagcatactctagagcacgggtccccagtccccaggccacgaaccggtacaggtctgtggcttgttaggaaccaggccacacagcaggagtgagttgcgggctattgagcgaagctgagttccgcctcctgttagatcaagggcagcatcagactctcataggagacggaaccctactgtgaactgcatatgcaagggatctaggttgcacgctacttatgagaatctaatgataaatgtaatgtgctcaaatcatcccgaaaccatcctcccggctaccctcttgtatgtggaaaaactgtcatccacaaaaccggtccctggtgccaaaaaggttggggaccgatgccctagagcagaccacctgggtttgaatgctgaatctgagatctacttaatgctctgtgactcagtttgtgagctcttaaataagggtaactatggttactacctggtagggctgctgtgaggagtaaatgaggctacatacagatgaggcagaggataatgctcaccaaatactcccctttccaggtctcctgcagctcctgctccctcccatttccaggtctcctgcagctaggtaggtggggccaagatcacagttcaaaccaatgaactacaacacctaggaaagctgtgaaaagtatgcatacgcttctctagtctctctcttcccctgtagagaagggggagcttccatgcgtctaagtctctgagttgctgttgctaagcagaacagatcccttcagtagacatgtcacacgagaagaaaataaaccatgttaagccatggagatttgggggttcatgtattactgcagtatatcctagcctatcttaaccaataaaacatgtaaagtactcaaagtgccagtgcctggcatacagtcaccacagtataaagacaagctcctgttatcagaattacttgtatagtaaaagttaaccataaaaataaaaataatgaaaacttcacctgccttaaggctgtgagggtgagaccagctcttttatcaaagagatattgattagcaaaatgttagagacagcataaagcattccagtaccaatcattcttaaagttcaatcttttcttatggtcaatgaaactttgctccaataagcgatggtttttcttctcccttctccactctcccttttccttcttccttcctctcacatagaaccaaaactctataccaaatgtaagtgaaataatactagacaatcacgtacacatatcgcgtgcatacaccctttagacaagtgctatgaacaacatgcaaaagccacaagctgaaaatgcaatcctatttaaaatgtattatttgaaatcctaccttgaaacactgaatgtgaatccttataagaaaaaaaaaaaaaaaaaacaaaaaccatattcaaattcagcctgaggtatatatacactaggatacctgtttattggatgtatttaagacaaggtatacctgtattgacaaacagaaaattcaaataatcagttatggtacagatatacaatgaaacagtatgcagcctgttagagcaaatttgcatatatatatataaaatacacggcttttttttttttttttttagcttaaactcacttaatagcaaaacctgttctgactccatttggttggtaatctcttgactagacttgaggtggggcacctaatagtctttatatatcagacttcatgtgaatattcaagtttcactgcagacacaaaactgtgtttaattataagcatcttcccaagaagtcactagggggtgtgctgcataatataaggcatgtacaccctgtcacccttctgaaatcggtaaaactctgaattttgaaacaaatctaaccccaaggattttggacctgaatgagatatatacctatacctgcagatatctatgcaaatcagcagtatctctgtgtacaaatccataaaattgtttcaaatactactcttaaatattaacagaagctagaattataatttttattttaaaattttccatatatctcaaatttttataataaatatgtatgattttttaaatagaaggagttaaaaataaacctttccctcttacccacccaccaacccacatggatagatcacatttcacaaaatgtcccacagtattaattggtagtgaggcagtgaggcatgtcaggaaataaggggatacctggtagatcaaacgctgaaaactgccaatgattgatgaccatttttttaaaagataaggttttaaaaatgcattatatagttcagggcacccagaagctaccaattttaccattaggcacatccatgctctccatactttttaacatttcaaagaagaacttgagaaataatctgctggctacaaatctagatccaacctgtacattatcagatattcttatttgaggggaaagaaaagaagaaaaataaaaaaaaaaacaactttaacacaaaccacaataccctacagtcagagattgcaaacaggaaatgctatgcagatggagaaatctttgctttgcttcaacagctctgaagcaataactgccctccaactgtttaatgagactcaagctcttatgcaagctatagaattgtccaaaggcctccggagagaagaaaccagatgcatggtgagtcctggctgacctagaatacttccgggtgactcccactatttaaaaaataatttatatacattttctaaaaccattgctgccttgggactttcaaagggtatggcatttaaatggttttcctctgtccattgagaatctatttcaatccaccagttattcctttcctgacccattttgcggttttggtattaaatggatgcaaatctctgctgactccttaacttctttgctaggatcacaggaatgatgcctgatgccaggagtagagcagacccagcattgcttagcaagtaatgattttattggtttccttttcatggttaaaaaaaaaaggttgaacgtaatttttcagtactatacatttaatcaaacatataacaaaaccacttagaaacagctaaaactcaagagcattctgcttcctttttctttttttaaacaagaaagctgcattgcaaagaaagtctttattattaatacactaactactaaggggcactcaaagtggaaggaatggaatctataaaggcatggaagcgtgaaatggtatatattccatgaacaacaaatcgtttgttatgtctggagttggctttgattaggaaggcatctttaatgagaggaaggataagtttagagagattgcaaggcaactaaataaatatttaaaaaatgtttttaaaaatgtcattatctgttaagtacatgctacgaactgaatgctttcataggtatttcacataaattatttctaaaaatgccaccagaatggcaactccaagaggatacggcccttgtctgtgttcttcttactgctgcatccctacagcctacccacagtgcttatgtagaaccctaataagtaacagaatgaatcataaatgaacacaaggagggattactaaaccctttttacaaaaatgaagaaaccaagactcaaagaactcaacaagcccacacaagtaagatgctgagtattttaatacaggcctcattaaaaatcaaaacccatgcacttgtaagtatgccacaaatatagtaaaaacaacagcaatagaatagatcttgtccacatttctctggcttctcaccactaagaggcagcattccctagatatattcaatcatgacaactagactcacttctgggaggaaatagctaatcattcctacttttatggaatagcaaccacatataggacttcaattagaggaagaaattagaaaacctattaaagtgcgaaggaagcaggactgaggactgcagatcagttggctcaaagagtatcaggaagtgagtttgatttgtgttctgcacatttgttttatgctgaaatttttatgtaacaatgtatactaaacactttcccctacttttctctccttgataataatttgataggttatacttttatttaaacttattttgaaaaaattatagactcaccaaaaaattgtaaaactagtagagaggtcccttgtacccatcaaccagcttcccccaatagtaacatcttatatatgttaaacagtacattatcaaaacgaaaaaacagacactggtgcaagacaactaggccacagactttactagaattccccccatttttgcatgcattcattgttttggtatgtctttgtgtatagttctatggcattctgtcacatgtatagataactacaacaatcaccaccaccaagttatcaaactgttccatcaatacaaagcaactccctcaggttacactgctgctccctttcctaaccgctggtaactactgatctgctctccatctttgtaattttggatgactttgactttagtcataaaaatacacagatggcaaggttatcttatttaaagtcactcttttagggaactttttttttttcactttaaggcaataaaagcttacaggggtataaagaacgtggatgtaaaagacaaaagatcttgcacgtacttgggtcatcttcgatcatcttcctgccccagtagttggattgccattccgcagatgtcaccgcattggctctcacaactagaaggggatgaggctgcaatgaggatgaaggctgatctgccaatgatgaggaattcattacatggggctctcggataagtcatattcttttgaacttctgaatctatgacttgactcaacttgggaaagtgtgtctgctctagttccagtactacatgaaatctagcaaattcaaaattgcttagaacatgtcatttcatctatttgccatccccctaaaaaaaaagaggtacagacaaaaggactagaaagataaactccaagtgtcaattatagttatctttgattagggggaatatgaaagagaaattgcaattcccctgtaggcatgtgttctttttataatacaaagtcccctatagtggctattaataccatagtaatactaatattaatgtagcctattaatactataataatccagtgtgtacaaaggactttgcaggttacaatatttttcacatgaatggtatgatttgatccctacacaaccaataaagtatgcagaaaaagtactttccccattctactagtgaggaaatttacgtctgtaagttaggcaacattaacctacttaacggtagggttggaatcataacaaagccttcaatttctgacaccagtggttctcaaagtatggcgcctaggcccctagaggttcccaaggtccaaactattttcacaataatactaagaggttatctgaatctttcactgtgttgacatttgcactgacagtgtaaaagcaacagtgagtaaaacagctgttgtcttaagcataaatcaaggcactgctacaaactaaagttactgtattcttcatggtcttgctcttacagtaaaaaaaaaaaaaagaaaggctattttcatttaagaatacccataatgaaaaagtaaaaatggatttttatcacatcttgaccctcaaatgcatcttttcaatgttctgtttgatgaaataggaagtatgcataaagccctttttaggcataccaaaatatgatggttgttttgaggaaaagtacttatgtaattttttgagttgcaagttgaactaactggcattgtttttttagtggaacacctttttttttgaaagaaagactagcaaactatggttattcggactccagtatttgccaaacattttcttgaaaatgaatgaagtgagcttatcacctcgaggtaaacaactgatagcatttattgctaatgataaaaacagagctttcagtggaagctaaaattttggaaaacttgaatttgccacgagctgacagtttccaaataatgttcatttgcatggtttcagattcacaccgttaataacatttaaggaaggactacttatgaagtttttatgtagtatcaaagattacctgaaatggctcttaaaatactcttctcttttcccaatacagatctgtatgaggccttatttcccatctacctcaactaaaacaataaattgcaacaaaatgaatacagaagtagacatgaaaatatagctaccgtctattaagttggctttaaagggatttacaaaaatgttaaacaatgccacccttctaatgttttttggtttgagaaaatagttatttttccataaaaatagatttttaaagtgggtttattttaaaatacataatacacatggaaaacgtctcagttttaatttctaagacagtaaatatgaatagaagtagtccacataaacagaaaccacatagtgtccttagtcatttttaagactgaggtcctaaaaccaaaaagtttgagaactaccatctaacactctcactctttccaatatgctataactcaccaatgagagaaatcaaaggacaaaaacaaccaagaaagtaccttgcacgctaaacacacacattagtttaattatcaccaggacaggccctggtcattgtgtcaggtgggcctttaccatccacataatccatcaaggcaatgtaattcgtggggcagcatcactgaaacaaggcataatctgtagccacagggcttgagctcaatccctaattgcaccattttgcaggtatatattttttgaagatttggtgcatctatctctaaaatgggatatgactgatagctgtctttacactgagttaccttaaaaataaaatgagaagatgtaaataacaattaaggtttgtatttgtgaaacaaattttttgtcaggtattatgcttagtgacttgcttctctgacctcaatgaaaccctgccactaccaagaaacagtcactcttatttatttttagagacaaggaaactagcattagaaaagttaagtgaattgccaaaggctataaagctggtgaggcggaaactaggattccaggtgtgattgggaccaaaacccatgatcctccaaccacctatgcttcatagcctctcgaatcctatgttacaaggtagaaaaactttttataggaacaattttctataatgtggaggaggggggagtaagaaaagcaagttactttaaaactgacttggtgcatcaactgcggtatgggctcacagagtaatcagctgtaagtgcaatccttttcgcagtcctcagacgtatggttaattaaaaacagcctcagccctatgcactgttaatgccaacatctttgtaggtagcccttgggagttttcacataacatctcacttgatcgtactttctataatcacagacagttcagaaaaaggaaaaaaacccgaagcatctcaatgatggttgagatagttaccatcatttagtgcactgatattttttaagaccactgccccagaaactgataaacacaatacacctgcaatagtgatttcttacatcgaacaaataacaaatgtttttctcatccagagttagtcaaaagctgaaagctagtatgagacctggcccgcaaatctatcctttcctttttctccataaaaataagtaatgatttagtataaactattaaaatactcttcaaaggcaatacttaattagaaaatgacattttttagtatttagcatagaccttcgaacataatagacttttggtacttgctggttgaactgggaatacaatttacaaagtctataaagtaccaaagcaccttctctttaatttctactgtatcagtttgcttaacgtttctggccttcactagcctaagagaacaggatttttgggaatcttctgagaagtatgggttcccacgggggtactcctgagccccaggagggtgttgagtgctgctcagctgggggctgcaggtgctgcacgaagatccagaaccctgaccccctcggggtgagttggctttctgggagccctctaatccaaggtgtggccctatcaatctgtctagtttgctcttccctttccaggaaaagcataaaaagggaagcagaaagttgctggctgttgtcaagttgtgtaaactcctgggactgccttttattcaatcagaataatgttttcttagtaaccaaactacagtagaaactgattcttctacttggctccctcaccaggaatgccaccaccactttcaaaggcaaaatttgttttcctttactaaatgaattaggttttccagcaatttcctttagatttttcttagacttctactccttaaaggggagtgggtgtggaaaaagggctgtagcttgaggtatgtatatgggagtagcttgatcagtacttctgctgagggaaacagcacaaccagagcatgaggtgacagaggcaggatattgtagaagagcaaaggcaacgggttcagagacagaatgtttgggttcaagtctgtaacacatactaatagggtaaatgaacaagttatatatctcaatttgcctcagtttcctcatctggattaaaggtacagtaaccacaggattgttgtaatgtcttcaatgaaataatctacataacacacccaccaaactgccaggttcatcaaaaacattcaataaatctcagatggttttgtatggagacaaacaaatgtattaggtgagcaaacgcagatgatgaatgttggcctgaatggccactgagctgtgtgtatggcacatatacacacagttgaaaggaacctgcagcgtagcaaaccgtagagatgagattggtccaggaaccttggaggtgatgactcttgacttaagccaatacatttggtccttggaaactaaagcaagacatcaatgcgaaaacacccatctcagagaaaacagatcttcctgcccaagcaagtcctttaccagctattaccaaagtgaactgtcagtcttgttttgcttcctctctttctaccacaccacactttgagcaaggcctccagtgaaagtgcaggcaatgctcagagtgaaggaaaaccgagggtgctcttctgaataaatgaggtttatataatctaagatttacaaaaacatggatttgttaaatccaaaagcacagaaacattagagccaaagttcaaaattatcctttccgaagtttttgaaaataataaataattctatgttcgatatttattttctttcagatttgcttattcgctgtgtaagattaattcaatggcatacatcgccaattagaaaaactgtcaggaagacagacacatacacacgtttatttattgtgacagagaaaaagaatattgtaactggccaaataggttaatggagtgtagaaaggtagttttcatttttcaaataggttatcttcatctgtaaactaaccttttgtatctaatggattatgacaaattatcacctaaggccacagaagcctatgtgatacatgaataactgacctaggttaaggacatcttgagaatgagttctggatccttaaaggaggtaaaagcacaataccaagagactgggagagaagagggaacagctcctcttctccagggcagggctaacttggaaaagcatgatataaatagttttcctttggcacctttcaacctcattgtactcctttctctggggacttaggaggattaaattatttcactgggtggctcttagagaaataatttcatcccccaaaaccaacaaaatccaaatgatccgtccaggtggtgttacccagaacctttctaagtgtgcacatggtatgagggctggggagggggttgcagcacaacatggggatgcccacacacgactgcctggcaaacagtttcctccaccacccccatccctgggtctgcctcccggggccagcacctctagtgtctcagatcgttagggattcttcctgtcatttactttggaaaccagagattccttaaatctcaaaacccttttcttggttgggggttaaaaggatgtggggagttgagggaggttcattatttatatatcagaaaccaaaatgcatgatcaccttcacacaagtgagatataatactttcaatgtgtatttccaatgtatgttcgacacagaaatcatcattcttttagccaattaaaaagcaaaagttgctaaaggttatctttaaaaaaaaatcaatggtagagatgtggaagagaattcaggttaagcagtttctctctcagcttcgataaatctactctatcagctgggccaaaggtacaaattccaggaatttcacaatgggattttctttaagcaaatcctaggcgactaaaaagctttttagttgaggtgtggaagttacctaggactaaaaagctttttgttttttctttctcacccctaggaccaaggattgagggggaaggattattgaaatgttctctatatgacgtaatattttggaaaggctgtaattctttttactcacatatgaaatgtcttaccagatttttcagcagtgtggacagttcctttgtaagagtagaaaacttgacaaacgcggtgccaaggtcggggttgtctcgacttaaaaaattactcccaaacttatcaagaacttgtgcatagttttcttcattttgtacatgatctaaaaacaaaaaagaagaagaaaggagtctgaactattatttgccacaatgaaaagttactttgaacaccgatcactacgaattctcaaaatggaagcataaactgtatcaattatttattgcacatgtcccaaaggttaggttaggagtacactaaatattctaactcactctactaaggaagattttcccttttatctttttttctttttttttgagacagagtctcactctgtctcccaggctggagtgcaatggcacaatctcggctcactgcaccctccgcctcccaggatcaagtgattctcctgcctcagcctcttgagtagctgggattaaagatgcatgccaccatgcccggctaattttttgtatttttagtagagacagggtttcaccaagttggtgaggctggtctcaaactcctgaccttgtgatccgcccacctcggcctccaaaagtgctgggattacaggtgtgagccaccgcacctcgcctttccctttttctttcatagaatttagctcatttatagtccagttaatccactaattcctcataggctgaggggtcaaattacatcacattttcaagcaattaagaaactatgattgactgggtatggtggctcacgcctgtaatcctagaactttgggaggctaacgtaggcaggtcgcttgagcccaggagttcaagaccagcctgggcaacatggcgagaccccgtctctacaaaaaattaacaattagctgggtgtagggccgggagcggtggctcacgcctataatcccagcactttgggaggccaaggcgggccgatcacgaggtcaggagatcgagaccatcctgactaacacggtgaaaccccatctctactaaaaatacaaaaaagttagccaggtgtagtagcgggtgcctgtaatcccagctactcgggaggcggaggcaggagaatggtgtgaacctgggaggcggagcttgcagtgagccgagaccgcgtcactgcactccagcctgagcaacagagtgagactctgtctcaaaacaacaacaacaacaacaacaaaaaacaattagctgggtattgtggcatgcacctgtggtctcagctacttgggaggctgaggcaggaggactgctggagactgggaagtcgaggctacagtgagctgtgcttgtgccactgcacccagcctgggtgatagaatgagaccctatctccaaaaaaaaagaaagaaaggaaaggggaaaggggaaagaaaaagaaaaagaaaaaggaaaggaaaggaaaggaaaggaaaggaaaggaaaggaaaaaggaaaggaaaggaaaaaggaaaggaaaagaaagaaaaggaaaaaggaaaggaaagggaaaaggaagaaagaaactatgattacctgaaaaagtagaaaattctccttggaaaaacaatcttggattgcaaaagaaaaattcatgtgtcctaacaggtttctttccctgcaactaatcttcatttcctttaattttgtctaagttccaggtctgaggaatagtatttgtaaaatgcttttcacagtccagctcttgctgcaaaatgttcagaattggatcagatgaattaggtgcacatgagaaacattaatttgtgaaaatttctcctccctgagcttttgttttccaatccataaaatgagtccaatatctaacttacagaattgtggtattgatgagctgacataaagtatataaaagtttctcagtagagcaaatactgcataaacaataacccccactgccttgaaacatgttctttgtctggcttccaggatatcacactttcttgagtgtcctcttgcctcacgactggtcctctccattgtctttgctggttcttcatctctctgacctcatcatgttgaggcccctcagtcttggacctttcttctctatttttgcttactctcttgggatctcagtcttacggctttaaatactttctatcagctgataactcctaaattgatatccccagcccagaaaaacccaccctctgtaatacagacatatattcaactacctattcagtatctccactaactatgttgaatcttaacatgtctaaaaccaaactcttgatcttcttcccattctttttctcacagtcccctatctgtggcaatggcaaatacactctgcttctgaaatggtctctctgttgctacttttgcctcccagcagtctggtaccaacacagcatccaatgcaacactgttatactgtgcatcagatcttgtgactcttgtggcagacattaccacttgccatggatatccaagttcccaatccttgcagggttacagaaaggagtactgcatttccccatactctcaaagtaaggcaggaaatatggcatgcaccatccaaggccatgtgagtggaagtgatgcataccacgttctcttggaagcatttcagatgcctgtactcaactctccacctccctcctctgttgtggcgcacagagaagcatgaatttgtagggaggcccacagtagatgcatagtatttacataatgaataaatgaataaatagatatttatcaaagtcatatctttttttttggttttttttggtcatatttttaaaggctttacaataaattacttttctttataaagtcttcctttagttggaaacaatccttccttgcccacaattctctgtacctctactgcagtattttctaccacatcctatatgtgtatatatgtatatatacacgtatatatacacacgtatatatgtatattatatgtgtatatatgtgtatatatgtgtgtatatatgtacacacacacacacacacacacagatcttttcctaccaccagaccgcaagaggcagggattacctatggttcacttctgcatccctacccaatggacactgctgtagttctttcagtgagctggactttcaaagctgcggcttggttaatatttgttgacctggatttattgaattccttttcaggaatttaagaagcatccctttctgaaatagcgtaggatgttcaataactgagatcaaatttttaaattctgctttcaaacacacctcaataagtgcatgggtgcaatgggcactcatgaaacagaacatgagtctggattgggaaataacccaggaagtctaaataccatgaaggaaacaagtgtcacagcagtccaatgaaacgaaatgaggccctagccagccttctaatcaccaccacattaaaaattcatggtgcctgcagtggttgtcagcatctcaggctgagatattaaaaaatgcagctctggttactatccaagttcactcagaggagcggctcagaaaaacagaaaagaaaggccacacgagctcaaccgagaagacacacaggtttcatctccctcatgtgctggagctactcctgataccttctgtctgaggccaaagaggtcccaccttaccaccaagactcctacctcatctgatatccttttctgattttggagacctatgaaaaaagaattcagctgtgtgttcattttacctgctcccaagggaagcacctcagtagtaaaaataggtatataggctgctttcttgagactatcaaatatttcaagtgaaaaatataattagttaatcgaatatacatgtatgcgccacccagcttaataaataaaatattaaagaatgattccctattcccctactcctgtccctctacccaattccgatctccttccttccctccctagacacagccattatcctgaattgaaatttcatgcaaaggttagaaagaattacaagaagctctccatctatctgtgatgacagactcattaaagaataagatggagttggctaaaggctaaggcagagacaggccataggaagaaggtgttgggagaagctcagaaccttctgtgacccaaatccttatgctttctacaatctcatatttcacccccactagttctgcaagggaagaattatgcttattaggtagatgaaacatgaaatgtgacgtgagtgaggcagaagactagataagtataggctaggtcatgggtcctgtatgttttgctaattccacagctgaataaccatgtagtctctttccatatatatatatatatgcatatgtatgtatgtatgtgtgtatatactggcatatatgtctcacatatatatacatgtctcacatatatatgtgtatatatataatttcctagcataaaaatataacagtttagtaagatatatcttggggtaataataacaataataatcataatcctatgaaaatagaatgatagaaaattaaatgtaaggtgcttaaaatagtgtctggcatgtggcatgtgccccaaaatgtcagctactgttaccgctatatatccatgactacttacaatacagagcgatgtctgtaatatcaaacagaataaaaacacaggtctcacatgtcttttttttttttaacatactgtattataaagttagtaaagtcaatactagaaagatcacacacatgtcccctaacacacacacacttgtgtacaaaattaagggtttacccagcagactttcaacaggcacagagagtgagacagcaaagaaccatgattctggtggaggaaatagcaagggcaacggcagaagggaggaacacactgcagagtacagtaagccatctgaggggaatgtcagttcagaggtatagggaagaggagggaaagaaggctgcggtggtgggacactgccacaggaatgagtgtttctgaaggagacggactgataaggcagaaaatggcccactcacttcaagaggtttcagagagcaggatgcagctctgttttaagatctttactacatgcgagtgctagaagacttttgggcacatagtacagtgggagttagggtaagtaggtgagaaaagaagactggataaaagaaaagaacagagaaatgtgatccatccgttaagaagacacattctttcccaatattcctaagaaacttctggcatccacgacattgttgcagaaggcaagataattgttttgttgctgatgttgagacaaggtcttgctattgtagacctgcgtggagtgcagtggcatgaacatggctcactgcagcctcaacctactgggctcaagtaatcctcccaactcagcctctgaagtagctgggactacaggcacatgccatcatgaccggctaatttttaattttttgtagagatggggtcttgccatgttgcccaggctcgtctccaactcctgggctcatgtgttcctcccacattggccacccaaagtgctaggatttacaggtgtaagccaccacgcctggcctgcaagataattctaacagctaggtgaatcctttcagttcaaacaagaatgaaataatatgagaatgaaatctggtctagttttaaaaactagaccagaaaaggccacttcatcacgatttcaactgccagcatttctgtggggaaatgactaatataaactaatcactgatttactactctagtattactattccagtaataatcgttacaatagctagtttgttgggtattgactaaatgttattgtattaagcactttacatacagtacattacttcattcactcttactaacagtccatgagataagtactattaccatcctcactgtgtagatataaacacttacccttgatcatacaactcataaataaggaaatttaaattagaatatgccaccccaaaacaagccacttcggcataacaattattttgagcttaaagcaattaagaaacagcaaggtggctgggtgcagtggttcatacctgtaatcccagtactttgggaggctgaggtgggcagatggcttgagcctaggagtttgagaccagcgtgggcaacatggtaaaaccccactgtattagtccgttctcacactgctaataaaagacatacctgaggctgggtaatttatttaaaaaagaggtttaattgactcagttcagccatggctgaggagggcctcaggaaacttagagtcatggtggaaggggaagcaaacacatccttcttcacatggtaacggcaaggagaagtatgagtaaagtgcagagtgaaggaaggaaaaactccccacaaaaccatcagatcttgtgagaactcagtcactatgatgagaacagcatgggggaaccacccccatgattcaataacttcctatgaggtccctcccccaacatgtggggattacaattcagattacaattcaagatgagatttgggtgggaacacagagccagaccatatcaccggtctctaccaaaaatacgaaaattagccaggcactgtggtatgagcctgtggtcccagctacttgtgaggctgaggcaggaggcttgctggagcctgggaagttgaggctgcagtgagtggtgatagtgccgctactctccagcctgggtgacagagtgagaccttgaacaaagaaaagaggaagaaaggaaagaaaagaaagaaagagaaggaaggaagaagggagaggaggatggaagtaaaggaaaggaagaacattttctgcctaaaagcaaggcataaatctccctttgtgaaagtgtttcccctacctcctttctaggaagaggagaaaaactgttgtcacaagagatgaaatgtcagtaccaagatgagtctgcataaataaaccttgttaaaataatccctatcatctatttgtttcccccttatatttatcttccctataatttactgccctataattcctagaagtctccttttctctgtcttgtcacttctccacaattttctgctctttgctaaaatggtatataagctcctaggcctagctgcttctttggggtttttcatttcttttccgtgaggccccttatgtccatactaaataagccttttctcctgttaatttgtcttttgtccatataatttgcagatgtcagccactgaaccttacagggtaccctcctctatactccatatcctaaagtaggacaggcctaggttcaaatctcaagtctatcatttactgtctgtgtggtaccttggtcaagcagctttatctttctaaacctcatcctccccatctggaaaatggaaattataatggcatttacctcacagagatgttattaaatttaagcaagatactgcatgccaagtgcctcgtacacgatgagctcaataaatatttataatggcaatgacacaatgatgacaaccataccaactatccatccttggccactgcattggagccagccttttaccccgtggacaggaagcagaagcttcagacaacgctgaagagtttatatccctaggcgttggcaataacaagtaccttaggaatacattaaaattcaatactctttaaacatactttgtatattcatccaatgaggccttcctcaaaactttcagaaccacagcaattattaaataggtctctccctgaggggtttatctaactgacactatgtgttataccttaccaaactgggcaatattcacaaaacctctggactggactgcctgccaacctaacctttgattctcagcgactctaattatggctgctacttattaagcactgactaagtagagggattcaatcacagtgaatatcctgaaactcatgcgatactccctcaaggcagttgctttatagataagaaaaatgaaactcagtggtgaagaaaggattagatcccacttcatttgattccaaatcctatccttctccactgacacactcaggaaagactatcgtggatactagaatattgtgtgccacaatatctattcagaatccactatgtgaaagacttgatgacaaataccaggaacaaaaaggtgaataagacaagacttcctgtcctgtaataatattgacaaagtaataataataataatttgcaatcacaagttttgattaatgtgccaagaactgtgctaagtatttctcctgcattatctcgttcagtgttcacaatttagaaactggtttagagtagttaagcaagttgctcaatgtcatacagctaagaagcagtagtgacaggcactgaccccaaagcctgtgctcctaactagtgtacttggtaaagtgcaggagcctctagaagtcttttaactttagccagatgccaagtgattgagaaacctgaaaatccaggtcttagctccagactctaccatgtcaggagactgaagctcctaggggccttaatttcttcatatataaaacaggtctaataacatctgccctgctgattggccactaagaggtaaaggtgtcataattaatataaaagctcttttggaaaaatgcaaaaaaattataaaaccacaaaggattatttctacttaatgggtataataaggccttgagaacactctcataaatccatcctgaggagcattccaaaccacaaccaagcacaacctagacaacatttggtgaaagatcacacagaacacaggcctcagtgacacagagacttgggtctgaatccccactctggttctaactgggcatatataaccttggaaatggcacttaacttatgtgggcctcaacttcatacgtgaaatgggacaatgcctataaggaacatggaatgagtctaaaaatacctttacttctattaatttcatttactccaaaattcagagctgaagttctgatgctaatggatgctaatttaaacatggtattttttggaggattccaggatatataagatgactgtggatcaaattccaggttttctgtttataaactgtgatctagggcaatttatacatcatctcagactcttgtcttcttagccatagtaatacctacttgatggggttattaaaggaaatagatgagaaagactatgaagtgcctcatctagtatctggtatacagtgggtgtttataaaatgctaagtaccatcccacactccagagtctcacttccttaatttcccatactctttcctgggagcctagcctctcttccaaggtctttatgcaagttctccttctgtgtcaagagtccagaggaacacatgataaacatttgtttatcatcttatcttcatgaacgaagaaaaatcttccagaggatagctgggatacacgcattattacactccagtcataaaacctatccaaagttctcctgtctgtaagttccatcacaatttcaggattcaccctgactctttcaatgtaagtgtaacctaccaagcatcctgtttttcactctcttcttagcctcttgccaaggtgggggtcccagctttacatactttgttatacgcccagttcccagtgctgagcctggcacatagtgaatgctcagtaaaatgctcactgcatgtagtggattctcctagaacaagtctttttccttctttcaaaaaatacttaccagcagccatgtgccagccatataaaatacagtgagctataatgtaataataaagccatgtaatatgtgacataaatcatagcactgccataaaaggggaagtgacaaattctttttatattatcctatgcatactttgtagcactaatcacacttataaaatatttaattctatttgtttttaaaattatataagtaattcatatgctattacagagaaatataaagataaaattataatttcctttccctttttccaatcccacctccttaagataagcaaagttaataatctggagtgtatctcagtgaaaccttaggattaaaaaagatatacacacacatacagacacacaaatataggtgttttcacccctttctcccttttaaaaaaaataaatgggatattacatacgaccaccatggcttgcttttttcctatggaataaaaatcatgaaatttaatataagtaaatctaattattttaactgggatatgttccataataaatacgcctgctgaaaggatactaggttttctgcagcttttgccatcaaaacacaatgctacaataaatactcttatacacaagctcttacacgctgttactttatctctggaaaaatatcttcacaaaagcaggactgctgggggatagtgtgtacatttcaagttttagttaatattgccacattctttccagagaagctggttaaagcaattcacattcccaacagcaatgcacatataaaaggggctaattctcttcaaccatatcagcacatagatgttactgttcttttttaattctggccacatgtgtataaaaaactgcctatagtaagcctatctttttgcattttattgtccattaacatttccttttctgcctgtttacatatttagccctgttttccaatgctagtatttttcctatcagtttgtaagaatgtcttgtacaagggatagaaacttttataatatgtgttgcaaatatttcttccacttgtcttgtaacttgttagtggtgtcctttgccatggagaaatttaaaaatgtcatgtagtcatatatatcaatctgtatgcaaaagacttttttgggtttccggccttatgttcctaagccttctaatatttagtatttttaaaaacccttaacctttaacccaaaacaatgtatttgtttatatagcacaggaaagggttcgttaaagtaagttattaaactttttaaagttttattcacttcaatatttaaatacgtaatacatctgcaatgaaattatctatatggcatgaggaggagttctaacttttttttctttcttctgtatgaaaacatactgctatttcagatggcctatagaaggcaactatttaatatttgataaaaaaagaacacacagacaacacttggatggagtgggttaggtttcataagagaagataattgagcagaaacttgaaaaatgaatagttgtttaacaagtagacttggggtgtggacattcaaggcaagaggtagcagcataccatacaggcaccataaagtactcagcaataaggaagtcagtgtttgcttaggtgggctgagatacacagaaactaatatggagcctttggttgctccagagcttaccaccttcaatctagagctaggtagattaagattttgttttgttttgagacagggtcttgctctgttgcccaggctgtaatgccgcggcatggtcatagcttgctgtagcctcgatctcctggctcaagtgatattcccacttcagtctctccctagtagctgggactataggaatgcactaccatgcttggcttttttttttttttttaagagatggggccctactatgctgcccaggctagtctcaaaatccagccctcaggcaattctctcgcctcagcctcccaaagtgctgtgattaacgttttaaaagcactgccctctgttcctgttcatcatcagatagtggctcagatcctttttgccaccaatccaaaaacttagtgccacctgtcctgtgacccggaaaataatttgttttaactttacagacaccatattattggggaatgagggctggatttggggtctaaactctttattttcttatctataacactaatttggaaacaactgctgattatgagcaaattatttcacttccctgagcctcagtttccttacattttcccaccactaactgtattagtctattgttaagattaaagacaaaatccttggaggcagaaagccctgtggacattttttaaaactgctttcctccatgccactttggatgattcatttctataatttctcaaggtcattttgactttggagttgttctttcaaagtcctaaccaagcctcagcaagagtctggccccagcctctggggtgttatctggaaactcagcatgcatattctcatttctgcagcactgacaaatccattaaataacagagccccaagaaaagatactcaaagagttccacagggctattactcagcatttaaacagcacctgaacatcactctcctatagcagaagcagaaatgttctctcttctggcttcatcatacagccttcctacctgccagaagaaatacacaatacactttggtttactgatggctctgtaggtaattgcaatgctttgagatgtggtcctaaaataggtagcaaagacacaaccaattcctcccctacttcagcctccacagtatgactacccaatggagtcaacccttctaaataaataggtgtttaaaaataggaccccatatttaactactaattcacaaactttcatcaagcacctacaatgggatacaaaggttatttagtgtttagaattatggccttgggtaccacctttaagtccttctgagctttagcttcttggcttataaattatatgtaaaatcgagataataaaacctcattgggttcttgttctgctaatgaggtggtagcctacgataggactcagcctgagcagctaccctctgaacactatttttttgtggtttttttttgagacaggatctcactctgttgcgcaggttggagcacactggcgcaattacagctcactgcacacttgacctcactggttctggcaattctcccacctcagactcctgagtagctggaaccacaggtgcatgccaccatgcccagctaattttttttttgtattttttgcagagatggggttttgccatgttgcccaggctggtctcgaattcctgggctcaagtgattcgcctcccttggcctcccaaagtgctggaactacaggcatgagccacactgcacctggactctccaaactatttttaatcatcaatccgtgtcagtaaaacatttcaaagcatttccaatcaatgcttatatgtttatttaatcaattataaattattatatatattatactatatataacacagtatatagtatagataacatattgtttatataaatcaatggttctgatctcaatgtcaggggttccaaaaacccctgaaattgactgaaatattctgctttgtaagattttttgttttaagttcagataacgtgtgtcgtcgttctgaggcttactaaggggtctatgaccccaaaatgttcagaattagaagaaatgttagctgtatctgaagacaaagcttcttgccctttctgggtgcacagttggcgagtctgagggaagggcaacagcacatgtgagatcaaaaggggcaggtctctttggatcagttgctagggaaatgcagtattgttagacactatcaactcccctttgggtataaacagtgcattttagaggctacaaaagtatcttcatctcatttcataaacagacaagaaaaaaaatcatctctgtttcactggtagaaaaaccaaggtcctgagaaacgaaggacttgttaagaaatactcagttacttcctgtcagagtagagatcacatcccagctctctacctaggagcatcctagctcctcactgtacaggtggcatagaacaccccccaaaacatgacctcaactaggcttctccacttcagaactctgggaaaaagcatcaccctcaaatgtggacaagataatgagggccacagagaacacagatgtgctgggtgctccaaaagtatgtgtgtttgtgattcagaatatacacaatgggccaggagcagtggcttacgctggtaatcagagctttgggaagcgaaggtgggtgaatagcttgagcccaggcggtcaagaccagcctgggaaacacggcaaaaccacgtccctacaaaaaccacaaaaattagccaggcatggtagcaagtgcctgtggtcctagctactcagaaggctgaggtgggaggaccacctgagtccaggatggcgaggctgaagtgagccaagatcatgccatcgcactccagcctgggcaacagagtgagaccctgtcttaaaaaaaaaaaaaaagaaaaagaatctaaataatgaaaaaaaacaaaaaaacctttaacttgaaaaatatataaacaatgggaaaaaacctttaaaaagaccagtggctattatttttttttcttttagctcatctgaattttctatagtaaacacattaatatcactgcactttcacaatggggaaagaaaccagaaaacaccagtgagaaaaatcagcacggggtgttccagtccccccagcacccatacagctctccacaatgaaacaagtacatgtctgatcaattacccaagacatggaagatctgagaatatccttctgttgtctgtgaatgcaacagacaaactagccgagcaaagtcatcctctatcaacctctaaatgttctgtcttatggcactgattatcaatgaaaaccagttcagaatcagcaacaatctgcttgacttgcatacccaaatgaggcatcacagaatcagtaaatagttattctttcttgctaaacgcttaattggagaaacctctccagtcataaaaatacacttaaaaattcacattgacatgtgaactagaaataaaactaaacacacacatatgactgcttgttagaggttgtcatggcatggttgttttcagagggcagattctttgctacagtttaagtgcaacagctttatacaggaaaatacaatcctactttgatgagacataaaccatttaagaatgaggaaaatgcattttgaaataggaggcagcaagatataggtaaagccatagaatcttttgactgtagttgtcaagaagggtctgtttaaggctcaaaggtggtccttaacagtcattaatctgaatctttatgtaaacagtgaaaataactaattgaagactgaaaagcacaatggactctacctggcacagagtaggtattcaacaaatggcagctatatttatttttaccaaaataaatcattaaagcagagaaatacatttttatattcacctttaacagagcaaatttgttgttcatcctaaggctttaaaaaaccccaaaataggctgggcgtgctggctcacacctgtaaatcccaacgctttagtaggcagaggtgggtggatggcttgggcccaggagttcaagactagcctgggcaacatggtgaagccccatctctaccaaacaccacctccctcccacacacaaaacaaaaattagctgggcatggtggcatgcaactgtggtcccagctgctactcgggaggctgaggagggaggatcacctgagcctgggaggtcaaggatgccgtgagtgagactgcgttactgctctccagcctgggcaacacagtgagatcctgtctccaaaacaaacaaacaaacaaacaaacaaacaaacaaacaaacaccaaccccaaactagcggtcgtgggatgagtactcacaaatttattttaaactacttaatttatcatgatgtacattccccaaagatagaagaagcacacatcattaaaaaattaactcattttaagtaaaatgagagcactcattctacaaccagcaaaacggaggaagtgcatacacaggctcatacacacagtgaatagcttctaatttcaagtaaaagaatatgtgagccaataactaggatccaaaaattgaaacttcctaagaagcctcgggttttaatattattctggaaagagacactgatttttaaacagcattcttttgaatccctctagtttatccccacataatttaaggagtaatgctctcctgggtaagtatattccctttgggggaaaaaaaccccttccttgacccttcattattaaaataatgaaggaactcattattttaatttgttttcacctcccaaggaggtggacccacaagaatgcaaaatgccttgaaggcccaaagaaatctgtttagattttgctcaatcccagtatttctatctaaagccttttgagagcttaagaattgttattatttttactaatcaatttactgtaattcaaaaagattttttaaaaaatctggctatccacaaacttgaaaaacagcaaaaaaaggtaaaatttcctagagacaagctgcttttgtacaccttgtgacattttattctaatctattatgtctcttacatatgcttgttaagaaaacttttctccccactgaaaaccgcaggattaaaataagcattacatgacaccatggtaagacaccgaacctaattaccaactctagttacaactgaattcacactataccttcaagtttgaggaaatacttaactaaaaaatagctcaaatgaagttgtttggttacaaaaacatttgcttcctatccactgataaatttagtactttacctttaaaatcctagatttccttgtgcactatgagctttttcttaaaatagataatttaacaaaatgaaaaagtggagagaacaccacacattttttgccttaaaaaacacaaaccctgtgttataaaactatctactacttaattctaactgaaaaggaatgggagacaaaaatgtaaggaaatgagaaaatcaatggctgtcttccttgtaatgaaaaagctgcaaaactgtttataacaatttagctgtgttttgaaaatatgacttccacatcatatgctggtaataaaattatataccactgtcatttttttcctgcccagaaatattaaaggatttacaagcctcaactttcagaccaacaatgttatagattctaaggggcaccatgtgttaccaataagctaacatttattctgaatatatcctggcataaattctaaggaaccagccatataataatatgttcatttaatttgagcaaagaaaaaaaaagccaacactttaacacagaaaaagacctagtagcaggaatatcctgagttcctagtcccagaaagaagtgtatacctgtacctgtgttgtgtgagaatgtatctgctcaaaaagattaacattttcaacctaattcatttggtagaatagccaactcagtatacccacgcttattatgaaccacatgcttccatttctaaaagtgcagtatgtctcactgtgttttttaaacaatactgagaagcaagcagtaagctcttttctcaagccacacctgacttacgtgcattcacatgcccatgcttccaagggaaagccagccccactcctactgtactgacccagggtctctcacaaagatcaagatcaagatgtctgccagggctgcagtcacctgaaagtttgactggggttagatttgcttctacgtctcacttgcatggctagtaagtgagtggtagttctccataggactgcttgagtatcctcaatatggtagctggcttcctccaaagaaaatgatcagaaaaagaacagaaggacgaggttgaagctatcttgtctatggactggccttggaaatcacatggcatcacctctactacattctattcattagaagggagttagtaactctggtgtacattcaaggggaaaggggattaggctctatctttctaaagaaaattgcccaagaattacaataaattaaaacctccacagtgcccaagaaactactagtcattttaatcatatattagcaaaagggcgaaggagggagaaaatgggaaagggagagggaccactaaggcagacttccttaacgacaatgtgtttcacagattaataatgttaaaacttcaaaacttagagaacaacacaggaaaactgaatggcttggagaattttccattggtctaagtagttcacagaattgagttttgtgttgttttttaaaatgtcctcatacacaacaaggaaaagtgagacacaaattcctagaacaatcttgaaaccaaagggcttgcatggagacaatttgtttaaaaaaaaaaaaccaaaaaaccctcatttttataatgtttactagtactgataaaagtttatgtgtaaaaataatacattttaagagtaagaagcttcacaatgtttagccatttttcaaatcactttgggaagctgagtgattggtaatctccaaccagaaatatagaaatcctttttaaatgtttaaaaaatatcacatgggttttgtatcacttaagcattgtgagaaaacaagaaaattatgaaaatgcattgggaaacagatagcagggttcagcttcttgtggtttctctggatgaggccaaaagcccttggaggggaacagcttggattccactgagcatgtatcatggaaagctatgcaacaccactgttttactcatttagtcatttttaaagaattaaatgtcatagtgctgcccacaaacccagctatactatacttgttcgtgactgcagaaaccctatcaggcctcaatagtctgtgaggaacccagagggatctgagtttgtccctatatttctgagacatgaccatggaaactactattggtggtctcatctgggaaacaccaaagtcatcccacaggttacaatgctgggattttccatttgatggatccattcatgaatattcatgattagtgaatattaatagctggtctcagagagcttcccaggtagtaacacatccagccaacatgtagcgattcactcaacccttgttgagcccctaccatgtgttaggtagaagacaaatacagagtacctgtaaagagcaaagctggggtcagctgggctctctttccattatttgctaggtatggtaccctgaacaagttattctgtctctctaagcttcagtttcatcatctataaaatgagaacaatggtacttaccttattggcttgtttggcttagcctagtacagtataaatacaaaatgaatatcatttcctccaagtggtactcccttagcaccttcctcacgctacctcagatccttcttcctatttcaccctttgcactttgtaagctttcttttatagcgcttcctagtttctagttataaatacttcccagtttgatgatctgattaacatttatctctcccctactggattgtaaaattcatgaaggcagagactttgatgtgccaaacacctaacacccagaacaggagaatataataggtgctcaataaatatcttttcaaacaaacaaattacattgacaaatgcataaactacaaaaacgaaaaacatagtactagtcttatcaaaaaactcataggccagtgcaacagttcttaattttggctgcaagttagaatcagctggggaataatatttttttaatctcaatagctaggctctactctggaacaattcgagggtaagggtctgagagattcctgtttttgtttttaagagttcttcaggtgatcctaatcaacaaaggtaagaatcattatctactccaagagagatggttagtaattgcaatacaatgggatacatgttctcctacagtatcagtctaacaggacttcctgtgatgatggagaagtttctatttctgcactatccaatatggcacccactagtcatatacggctgttaagttcttgaaatgtggctaaaactgaggaactgaattttaaattttattttaattcatttaaaatttaaaaccatatctcaccagaggctactctaatagtacaaacctaggaggagggcacacagaacccctaatccagactggagagattcaatgttcaataagctgtaccacccccatccacaaagagggtgcagtctactggaggaggctgcacccaaactctgcatacagcccttgaactctcacctctttacatccatacaggaacaatctctcccttctgtcatacccatggcagctgtgatcaaggaaatcctttaaagaacaggaagaagcatatcccccagtagaggagcctttgtatgagctgctgagtgatgtggtcattgtggccaagggatgaaatgcatcttgagggggaacatttggaaaagagtcacatggagggagccctcagcacggtaaatacagcagcacctcgtggctgtaaagcaagggtctcccttttgcagctcacaagcatagagcctcaggtacaaaccatcatcacattacagagaactgaccattcttcctgagacaaacaatggttctcattaagctctttataaaatcaggctggtcaaatgttgtatgtggaatcactgaattaaaatagagaaggcactcaagaattcatctagctgtccttttcccccatctaccatttgttaggcacctactatgtggcaggcagtgtattaggggccttagatggtctctccttttgtccatacaatcccctgcacattagatattattttttaaatttatggtaaggaaatgtaagactcctggaagttaaataatatacttgacttgaacaagtataacaaagctaggattcaaactcagacctagactacttgagtttctctctttttcaaaggggtgtgtagtagtctattatatgtatactatggtttatttaataaatcccttttattttctgctcttccaaatcacaatcaaggcttcagtgaacctccttgtatataatactttaaatatatttttattggtatataatatacatacctacagaaaagtacataaatcctaagttcagcatctgatgaattatcaaaaagtgaactttaccatgtaaccaccactaacatcaagaaacaacaatatcagcaccttagaagcccactttgtggcatctcctagttatttatttcactcacctccccaaagagctagtatcaaacataagggcctaccacagtgtgggagttcattgaaataaaagcgaaagggcaggagttataaattaggtatataacttaggccaagacctaaaacaacatttggtcataactacatgactattagttatctaccttaatgagaagttagtggatataaagaaattagggagcaaaatgaaggcaccagggtgcaaaatgtgttaacaattaatattacagaatgtctcaaggcctaggggggtttaaaaaacaagagaatattaggtttccagtttcatttggctagggattcccagctctgatgagacgggaaggccataaagtacctgagggttttggcttgttcaggttccattcagctcaataatttcatgatgataaaattaagaggaacatgcatttactgaactcccataacctggcagaccctttacagatatgagatcattaaatcccttcaacaactttttttaataccactatcctcacgttacagaagaaaaatggaggctcaagaaggagaaataaccagctcaaggtcaccttgctaataagaagtggattagcaaggacgaaagcccacatctgtccaacttcacggcctgcgctctttctattatagtctgctgccttcccttccaggttttctgttaagttacagaccactgatttcctagagaagtaacctattggtaggtgagctggtactgcaatagtaacaaaagatgtgagtgagaaactctgaaatccattttatgtttccaagcttctcttctacagtgctggagcctaccattttttgtggttactcatttttttttttttaatttagtttgtttcctcttattcactgatgacatacttttgcctccaaggtgacaaagtcactagacagttaaaacatttagttacacaggttatctggcacaccttccaacaaaagaaaagatgatagttcacaggtctgttgaggtctgaatttaactttgccccctcctctctaactttttccacaaccatcgccaatattgattttcaaatgtgtacaggtacactgaagaagggaaaagattctgatgtgtttaactgaagccactgagttacaggttgaccaaattcacacagagattttatctatctcatgttacttgtgacaaatttactcataactctattaagcacttaagtgtacagtaaaatccactgtgactaatgcttttcttctttctgttttggaaacactaataggtttgggctgacagtcgagataagagaaaaaaagagaaatttcttttacctacttacttttccatttgtgtcaagtttcctataaacttaacatcttttaaataactaacaaaactctgtagacattatttataattcatgttacctcatttttagtaagtgcttaccttgaccagaattatatattgcttttacagacttcttcactttctgaagggctgttctatcttggtctagagcctaaaagagaaaaaagggggaaaagatattagaagatttggtaaattaaaaaaataataagaaaaattcatttgtaattgcatttgttttcctgagtaccaaagcaacagcaaactgacatattcattaacaatgaatcatatcagactggaagtccctgggatctgagtagttatattttccggagaagtgcagtcattccacaaagctcagtgtgtgaaatggatagcattttagtcagtcaattatcatgctaagctatgcacaagaaagacagtacaagacactgaagaaatcttaaggcttggattctttcatgcatttacaatctggtaaggagaaaaggcaagcatagacatgaatggcacaatacccaggcaacaggacacactttatcacctaaatggtaattttagccagaaaaacatttcaaggggtataatgagtaggaatgacctgaagagcttttcacagtgcttttaagttttgcgatttcttttagtgttaaaaaaaaaaattagttatgacatatggcagttgaattttggcaatcttttaatttaaaaaaacaggttggaaaatgccatcatgatgctggtaatgcttttaaatgatttcttggatgatgaatcaacacattaatctacctgtggtataagcaggggggcttctaggagtctattgttgttgattcttaatccaggtacaggatataccattgtgtttagtttgttaaaattcagcaaattgtgcgtttaggctatgtactcctttctgtatgtgtatcacactccaaaaacaagtttaaaatggggcatagtcaatatacttggcacactggactaacttgttaaaacaattttaggcccctttctgctacttcaagggcctctggtctgcttgggaacccctagatgatatgtcaagatttggaaggcatgagcaataacagtaataaactgcataaataaaaatttaaaacattaaatgtacactcacatccattacatcatctaaacctcagaacttcagaccagaaaactgaagcccacagaggctaagtacttccctgaagaagccgaaagggataaatgcaatggtagcaggcacctacaattccccttatggaaaatggtctttcctaccaccttccttcacctcttgttctctagaccccagtgtctggccaggtgagcaccagactcatactggactcaacgtcattcctcggatttctgggcttggaaacaaggaccacaatgctcagtcgctttctggtcacatcagcttaagactgccagtggttctgtttcttgatgtgaggaaaaatctggccagacaaaatgacattaacagagacacagtaacagagaaaagaggtagagacactcctctggcatctgagtttttgcttccagctgttcccaaggcatatgtcactgttaaccttcctacagtctgagtacacgagacaacaaattccttctgtcccaagccagttgagcttggaattctgtcacttgcaaccacaggtcctaagtaacactagaactaacatttactgagcacttactagacatcaggtataaaacttattatatttataaaacatatcaattatataagatatatacactttcaaatattttatctctttgcattgcatctttacagaaacctgttaaggatcatcttcatttttcagataaggaaatgtagtagaccttcaataaatatttatagaaaggcaaggtgagaaaggttaagtaactttcccaaggtcacagagccagaaaatgctaatgtcacattctacacttatatctaccaaatcccaaagtgtatgctttctttactgggatgctgagacaaaaaacagggtttccagactgcaagtctaacacgatttccaccatacccatcacctacattctaactccatatcttatcacatccactgcctacctgtacttctgttcaatatcttcctttaaatactcttgtatctttttaaaaaaatttaaataactgtattgtaaagagttacaataaatgaaaaaccaggatcacttaccattgatagaagacactttgaaaattacaatgtacctctacctatacaaaatgctcctccgcttaggatctcaagtcatctcacatacctgtcatgctgcatgtcatgcttaagggaatgttttatgagacatttcagggaagagataaattttgtattactgaaaagatttaagatttgcattgtagaggaaagagggaagataactaatatttaacatatacttggtataaaccagaaagcatgctaagaggtttacagagattatctcacttaattctcacaaaagtcctgtgaaataaatattcttattatatccattttatggatgaggaaacagaggcttggcttagaaaggttaacttgtccagggtggctgagctggaatttgaacccaggtctttgacaacacagagccttatcttctaaccactacctaattctgcattctaatgatatccgcgataggctgaaactaaaaacagtctcatcatatgggggaggtgacgactatataccagttttgagataaacctgagttttaaaaatatataagacatttagattgctaagagcaggagggaaagaacatgatgcaaataagcatttacttaaaagactgaatccaatgggtttattcttagatgaactgtttttgtgatgtcattgttttaaaatgctaaaaatagtcattaatttttttccatacttatgattgccctttttccctgatgaaaaaccttgggccttagagaaattagttagcttgccaagtgtcacatactaagtaagagaagagccagcctatgctttttcaaccatgccatctaatctgttgtggaaggcaagtccaagtttcccctgaatcaacatttcttaattattttcaagaaagaaacaaagatctgcttctggaggagaataacctatcggttatctttgggggaataatgactaaaaaaggatggctgtagtctaacagaaattactaagtggactttacagttaactccaaatgagcaaatgaatgtgaaagatttcagccataacattttttgagaccatctacctacttccttttgtgggggggagcgggtacagtctcagaatttctgttcaatgtttaccaacttgcctatgaactggtagggtgtaaagttcatctacttacttttaaagtttattgaaagcatcctcatttgacagctacagtcaggtaagtctaggtgacacttctttttttttaagcttgagtgtttggccactggcaaaaataagctaaataaaatgcacttttaagagcctcatgttttagagagacaggggatactgtccttcaatcaaacaaggctccctctagaaataatacaagtctaagtgtgctacaaagttttattcccataaatgccaaacaacaactgcagtgacatcctctgaaatgtcatatatgtaaaattaaataagggctaagagaaaaatggtagataatataggctataagattatctttcccaaatcattagaagtatgataaaacgtgtgcgggcatttctaagtatgtatccgcagttggacaactcaaaagagtggggtgagggggaaagaatgaattaacaaataaatgaatacaggagaatgtaaagttgtgccatacggcattattacattctctttaacattacataactaaggatcagggatggtagtctaggagagcacttccaaccttgatacgaagactttttacttttatttcacacatagtcctaacaagttttgtcatttgaatctaggcccagagaagatgcaggctgctgcaaatcagagagaggctgctaggaagccatactgacagaggcactacatgagagctgacagccaaaaggatgtagaaaaattatacaaaccagaccataaggacagaaaagtccttgagactttgaggacaaggagggtagcatacctctccaggccgagtggtatccctcagtcacagcagagtgtaagagcagatgttctcagagacgcgtatgaatctgaccatgcctgctcaggacatttgaactagttgattgctctgcctagaactcttccccaaagctctctggatgactggctctttcttcttacacaagcctcggattaagagtcctttccccacaaaagccttctaaggataccctacagcagtgtataccctcggcccacccaagggttactctcaaatgcacgtcatgccagtttttccatagtgttaccacatcctgaaatgatcctgttcatgatttgtttgcttttacggtatttttctctctactagaagaatggaagttctatgaaagcaggggcttgtataacctgttcatggctgagttcctagtcctagtgtctagcacacagtagatgctcaaaaatgcttatgaaatgaagcgacaaatgactgaatacataaactcatcagtataatcatctccacaaaacagagaagtaggcaacataagacttgctttgaaaatggttgacaaaatagttctagattcagaaaacatggtcctctgtaattcttcccctaatggttttgaataaagtttaaaggtatacatatctaatatgtatagccatatatgtagaagagatatgactatacagtcatgagaataatgtcttaacaggacattgccttcaaatagttattctgtgaactttctttaaaaatattttattgaaatatatttatgctaactgagcaatggcaatactgttgccactattcattaagactttctattttagaattactttctaaatctatggcactttctatatactcaagtgggaaaattgcttttattttgggtagattagattttagacaataaccacaactctttggagctaaattttatgtttacagaggcaggaaatagtacataacaataaaatattagcatagaacttcctagagatatgccaaggtagcagggaattatacctaccatctaggagtgctctgagcattcaatacattaatgtgcctagaagtggctagcacaaagtcttgaatggagcaggtgctcaaaaatgaccagctatcattactctcacctcagaaggcagttgccagtgaaacacttggagcagtgacagcaaaacacctctgaaacaaatactcctataccaaagtgatttccttaaaaaaaaaaaaaaaaaaaaaacaacttttttttttttttaactcacttggaaaaaaaaagggcttccattgtattgctttatagtatattcagagaggtcatttaaaaaatgctttttaatggatgcatttgtcccataatcgccacaaggcaaatgttcttatatgtgttattcctttaataggggaagcaagggaatgctactttggcctaattttggtttagactctgattacttcagccttgagcttgttgggcaatcatgctaccttgatgggaggagtgaggattgaagagcaatgtgtttagggatgcctaattaacacttgcataagaggatgaaaaagtgacataagttctcatgcagcctcacagccaaatcagtaaattatttacccattgtaaatctccatatgctagaacatatacgtgaataatcataatgtgaaggcataagctctttctatgcattcattcacactgtccaatgtgatcatgagtagagttgtggataaaggtgccagaagaaagaattgacaatgaagaattgtcactgtctcctcctcaaaaaggggaaagatataggcaaaccacgcaaatgtgtgctgttgaccttccatacctgtgggttccacaggccaactgtgggacttgcatgtgcatagattttggtatctgtggggatcctggaaccaatttctctgagattttttctgatgatcatcaaacttgggtttttacatcatttaggcacttattcatccactcagtgtgctagacgcttcaacaggcaccagccaaagtgtgaaaaccaaattgtgcatctacctctccttaaccagctgcaggcctcctcacttcttgccacagcaaagcagcagcagcaaaaccctttgctagaagaaatgggaagcctggtaaggcttctgataagattgataaagtaagttgttcataaaacattcattattgctaacctggggcttgctttatccatacttctcacatcattccactctaccttattttttagatgtttaagtacctgcgtctctccctgtactccatcaactaaaaactccgtaagaataataccaggataatattcatgtttatttcttcacatagaagatgctttgtaaggattcactgacatgaatgaaaggaatgaacacatacacactctctctctctttggaggaagaaaggaaagatgaaagaattcactgttcttccaataaaactaagtcctcgctactgcctgcaaggccctacgtgacccagccttctgccctctcccctctgttcccacaccctccactactcattatgttccagccacacctacagtctttctaaccccaatgagctagtcctgccttaaagcttttagaattgctgacctctctcctgaaatctttttcttaaaactctcttcgcctaaatctaaacgggcctagcttgtaccttctctctttttttctgccattcaggtcaaatgccatctcacaaggacattctgatggtccaactcccagtcactgtccattcattaccctctcttacttcctaggaagaactaacactctctgaaatgatcttattgttatgctcctgcgtttatgatctgtcccaatagaatgtaatctctcaaagaaggtggtgctatcctgttcatggcaatgtcaccagcactgaaaacaataggagatgtgcagtaaatatctattattttttttactttcccttcttttcacaggtgatgacctattaaattcattttaaagacttgtgttagtcactgatctggctggagggccgaatcaagggtgtatagatcaccctgttgtaatcttcagatccagactaaaaggccccaacaggtagcatggtatcagacctattagagcactcagtggaagctgactgaatgaacaagcaaacaaatggaaggtgaaagaatgaatatctctcttatgtctgtgtctgacatttgaggacctgttggtggtttcagttaaactggcctgagtactatgtgaatatgaactccttgttgccttgccctctcctatactagtgaacagatggtcccggaatctcctgattacttgaaattaaaacaagaatgcccattcctggagactgtgcaagaatccaaaatgaccacgtgggtacaataaacccttccaaagcagctctatctcctcatctgaaagggtaagtggagtggccacaaatgaaattaaaacctaactagtctgaaaatatgtctcatcatttcccctcactagaattatctttctatgcactcatccacccagcaaacatttactaagcaatggctaggggttaggctataaagatacagaagcgagtgaaacatagcctgtctgtatggcacacctttggaagagcaaagttaagtttcacggggttccagggataacaaaaagaaggttggaaagtaattaagcagagaagaagggagctaactaagagtgtcccctgtgggccaggtgctgtcctaggtcatctccatctttaacccctgcaatcctggaggagaagacgcccatggcattctatctgacactcctcttggaacaagccaggaaggaatgggagtaagggtgcagacaggaaagacaagttgaggcagagagaagcagaacagaaataggaactccaattacagcagtttgaggagttgaggtgtggagtgctaagaatcatcctgtgtaacaacacccacagttagtggggttcaaccaggaagcagcagtgcagaatacttgccaacagaggaagagggacctggcagccgcagcttatatgaaaggaagaggtaaagatgttatcatgttagtttcaagattaatatgagttgattgaggctgccatgaaggggaaatgaccaacctaaaataaaatttgatttgcataacacagccccaaaattgaaagttggtatgttatctgcaaataaaggttttaagatgtttatctgtgctgttttagactataaaaagtgtccttaagattctcctgtgcttataaagatttctgtcagaaacatttaacgtcttctacggtgcctacagcttaatggctgcatggttctcagctggaatttgaccaaagaacaggaaagatctgtaaatcctaaactttgaaaggtttgggccccacttgacaagttacttcacagttcagatccttggcaaaaatttaacataccaccttcgaccaatatctcctaaacaattctaaggatttagtccatccaagaaaacaccaccaagctatcaacttcccaagccaaagaaaaggtactgcataaaactagctcgcaaaagtctgctctcctacgtaggcataaattatctgttaggtgtgtatacgttttgagggcagggcctatgttaggcccagagtagggctcaataaatatctgtcaaataaatctgcctctatattaaaagcatcaagaattaaagctgtacagaagaaaactggaactcaataatgctgctatttctcatgtactatttgttttaatgccttagtgtttattacaatcacttaaaggaagcaccatcttaactaaggtaaatattgcaacacatattttttgtttgggtagcacacgtaaaaatattcactatctaatcgccccgggactcttggaggctacagtggttcccaagcctcatcttgcctttcaaaagtcagtcacatcacgtatcaataatgaaatcattttataatcatttatgagggcttacgacctggatgaagcacactcctctcaattaatcactgcgagttgtaaaggaagtcttacaaagtcctacatgtaacacgggcaaaaggaagccatttgcggtgaagggcctgcctacctccctccccttcgcccccccatgggaaaagcagactccgagagagactagatgagtgaagggagatgagtgaagtatgggcctcctatcatatcaacaaccttttcattaaaccactctgccttttgtaccaatggcagaattcagcaatgtgtacagagaaaggaaaacagatccccttcaaaacccttgatatggtttggctctgtgtccccactcaaatctcatgttgaactgtaatccccacatgtcagggaaggggcctggtgggaggtgactggatcatgggggtggtttcccccattctgttatcataatagtgagtgagttctcacaagatctgatggttaaaaagtacggtgcttccactctctctctctccagcggccttgtgaagaaggtgcttgcttcgtctttgccttctgccatgacagtaagtttcctgaggcttccccagccacgcggaactgtgagtcaattaaacgtcttttctttataaattacccaatatcaggtagttctttataccagtgtgaaaacaaactaatacaacccttaaaatcaaacctgtcatcctaaacaactacagccattccatacattctgtaaagagaactcaacccacctctgagggctaagctaagttttgcttttctctgggatgctcattctctgcacctaatcagtagaatccttgatggtcccacaccatctggcactaagttactatgagtacccacagttctaagtgaccattaatgttccagaaatcaactaccatttgttaagaggtccaacctttgcctcttggaagaaacatagcctatcacgcggcaagctaccatcttgagaggtgtaaagccacggctacaaacacaagctttgaggtcatagagacctgtgtcactgcttggctaccacacactgactgtgtgaccctggtcaagttagtcactctctctgatactaaaggtactgttaacacctttctcatataatacctggcacagacatgtgtttgcttcttttcctcctttccccaatggtcctcagagtctgattttggttcattcttgtctcttttctccccagtattgatgatgataaaatgacaatgtgacattgccattaatcttatatcatcttatataatcaacacagtaacttataagaaggtttctattacctatgtttgacagataagaaaattgaacatcagaatggccctaagatatgcagctaataagagagccaggattccaaagcaggtcttcctgatctcaaggtctatattcataaccatgttgctctccaacccttcaacctgacacaatggggttcaaaagatggaggacccttaaaaaaaaacaacaacaaggattcagtcatcaggccactagacaatcagtttcaaagacctttttcttcccattccaggaggctctatgtaaaacagctaaagagtagttgagataaaaagcaaagtgggaaggagtcaacttgcaggtcactggggttgtgccacccaagcaggtcagacgtgagctgcacatcagccatttcacataggtctatctgctaaatactttgctcagcatagtgagtgtcagttaaaaccacagaggggctttccacttagcttcaggcacaccctgggaaccacagcttttgtggacttcacaaattgaaaactagtcttgacaatgagcatcattttcactaaaactgatcgctggcatgtgtacctgcatacagaaaataggcttaatataaataaccaaccacaacaccacgtggagatgcacaggcttgtgaaagcttccaggtgccctttaaaatactggtgacttactgaaaaacaccactgagagtgactgattggtagaaaaatccttgaaaagaattagtgggcctatctgtggcatcaggaaagaaaataggagcttacttatcaaagaggaatagtttatctacctggtatttctaatcctaactctggcccattgagaggtcactcaagcattcagtctgtgctgaggaatgtggcgggtgccgggggggttggaggggggagtgcggaatgaacaggcagatacggctcctacatctacaaagacctgtacctccaggcatcaagtctgttctaggtgtggggatacctggtgaagacaagaatgttctcttcttcaaggtggagtagacagagaacaaccacgtgcatgccaacattctgagaaaacaggcccttgttgttaagaagcatcagggagatcagatgcctgaaacaagtggccacaggagggatgaagagatacactgggacccatcacacagggaggaaagggccatggtaaggagactggattgtattctggaggccgtagtttggccaagatggagcctctagggttttagaacaaagacgtgattagctctgaccttgagaaaaatgactctggctgttgtggtggaaatggaaggtaaaggggcaagactggaaagggaggagacaagctgggtattacatcacaacacttatctgaagtatttctgttgtggttcaatccacttcctcctctgggaccacaccccaaactcaaggcttcctccaaatcttctcttcctcctccatgtctatttagtaccacagtgatggcacaaagatgttcacccggacaccaaagtcacattcctcttgtttaacccttttcccaagaggccacaaaattctgccaattcaatctcagcagcatttcttttttgttgctttctattttttagaaacaggggtctcactatgttaataggctagattcgaacccttgggctcaagggatcctcctgcctcagcttccagagcagctgggactacaagtgtgtgcctctatgtcaggttattctgcagcattactgaaacccattccaagggctcctgtcttactttaggacttaatcatgccccagccaggtacttccacagcctctagcagttcatcctccacccatccatcttccgcaccattgcagagtgtttctaaatatgtctagtcatgccactctctgactttaaaacagaatcaagtggaacccccaaccatggctcataaagcccttctctgcctcacctcaatctactttcacagactcgcctttgcagccaacccacccttgtcactgtgactgtccactttatattcctggttctccaagttcatgatgtcctaacatgccaggctcctttctggcctttatgactctggagatgctaattctagtagctaaaattttctcttttctgaacaatacttctgcctctcaccattttctccatcatcttcttaacaattttacaaactcttgttcaacctttcagattgggttttatcacccaataagaaagtttcactgccccccttccccaattaagaaataatctctcttcattcactagtgctatgagagcacctgccaggttataatgacattttcctcacatttttatcttgacaaagaacagttattaatcttttaagataccagacacacatatgtatgtgtttatttatatattacttcctcccagttgtagagccatcttgctggccctgcaccccagggtgtaggagaagatctagatgtgcccagtgtacagaaactggaacctaccatctaaatttgactgcccctcagatgtctctggttctcagcttcctgacctgcaaatgtgcaagactacaccaatctgcagtctcttctggctctgatttctgaaaatcacgtattttcaaatcctaggaacattattcttctctcttagcatgctagatttccttttaaatgaaagaaattttaatttaaaaaaaagtaacacaaatagcatcaacatggaaatatatttgggaaagtatctgatattcaagatttccatgcaattaaaaagataggccatagtgtcaggctcagattctaattccagccatttcggtgtccctattttgcatcctctgacctccaagagatattctgaaaagtctaccttgaatttactactcaaagacttcatcaatctaagaagacatgcattaataatgcctttttggagatgaagaaattaagtcagaaagtagggatccagggccaaaaaactagtaaacggaaaaatcaggattttaaccctggaaagcttaactccaaagtctgtgctttctgccatgtctgactgcttctccaactaaaaaacatgttttattctactttttgtcacgtccaagtatggcgcatgctaagcttactatagttgcttcatgttcctagtttctgagaacagaagtttgaagggaatacaagtggtaagccattggtgacttctccacttcaattatgagtttagacccaattgtttattcatcaaaacaaacctcagagctgccaaccacagatctggtcattgtgggttttgttttgttttattttttaataaggagagaaagacctaatttggcagaggagaccaagaagcccgggctatacatttgcataaagatgattactaaaactgaagaattgcttctcataaaaaaaactgatggagttaaaaaaaaatccaaatgaattaaaccagcagttcctaccctgtgatttgtagaaaactgtttctgagagatgctggaaagtattctggagaaaacaattaatctgtttaccatttgtaaaatggtaaatttggaaaatactacattctaacgatatctttttcctggagatactgaatgcacgtcaggctatcaaagactggaatgttttaaagaaacatgtttaactctatactccaacaattcccaacaaagataaagtaaataattaaataactaattacaatcagaatacctagttttgtttttatttttgcacacctgcagaacaatgttttttggaacaccaatatagaacactaaattttttaaaatgggccaggcgtgatggctcacgcctataatctcagctctctgggaggctgaggtaggtggatcacttgaggtcaggagttcaagaccagcctggccaacatagcgaaaccgcatttctactaaaaatacaaaaattagcccgatgtggtgatgggcacttgtaatcccagctagtcgggaggctgaggcaggagaagtgcttgaacctggggggaggaggctgaagtgagatgaggtagagccactgctctcaagcctgggcgatagagtgagactctgtcttaaaataaataaataaatacataaataataaattaattttaaaaaactgaacaaagttaggcctcaaaaaaatatactatgtacatcagctaaagaggtctgacaattttctgatgtcaacaacagatactatcagcaaaaagataaataattgtaatcaatttttatagaacaaacaaaaccaagacaaaagaactaagagggaaaaatacaacaaaaatcatgcattagacatatcgaagttgacatctctaatacatacttaggatgtagaattcttatgttgctgctataaagacccagaagaacagagggacaaaaaacattaacacaagaaaccgaaaatagcaaacatatgcaagtaatttcaattgcactgataagtttaaaattccacatggaacaataataaaatgcattttttatccttctaaagctgtaagaaatagaaaaaagaaatttggtgaatggagaggctttggagaaatggccacaaaccatacagaagacaaattatatttcaagtcacaaaaccacccttacatttgacatagtaaatccagtcctgataattcctttcaaaacaactgttgccatttcctcaataataaaggatgtgtattatcaaatgttctaaatcatcattagcagtgttttatagaaagttagaagtaacctaaatccaacaacagtaaaatggtaaactaaaataaaatagaaataggaaggactctatggttactaaaaattatgtatggaacaaattagaatggacaaaggtctatcatttattgtctaatacatatgtgcagatatcataaaatatcataatttagaacatcaagttacatgtattataataatgtaaattatctagaactgtaaagtgcagagaggtacctacagatgtttaacagctgtgctatgttgtaattaagaaaattttttcttttaaaataatttccttatacaatattaaaagattgattcagtacttaaaatatttttaatcctcttaacagtgtcttataatacatgcaatgcctgctttttcctgagcaatttcaaaggacccaacaatatgttaactttcatagaaaacaaggcagaaatggtacatactctcagtaatctccatgttgccttgtgaactgtacatttaaaaaattagtagaatattgtgtttcaagagctcctgtctggggcccaaaagaaaactgtaatcacagcaattaccttgtgaacctctaatttctgttgtagttttaaagttcggagttagcacacccacccacaagcaccatggcttgttcatcttgatgcaatttcagtcccattcttgggaaaataataattataggtacaacaaggtatttaaagaccaaaaaaatactcatgaaaacaccacttccatgttacaacacagtgagagttccttaaaagaattaaaacccagactggaaagaagtttcctgagtcacatcttttcaggacagtaagaacttacaggatcctacttcaaaagacaacagattggaacagtttggaaaccaccaagccttttagcttcccaccagttctaagatcctataatgtcctaataaacctatttgtctgggtcttgacctaaatgattcaaaatatgctatgcatggctcacagtcattcaggcttagttacacaatttttgtctgagatggagaatcacatagctaccaactagatgctggaatttaaataacatggtttggaacacaaaatctagagccaaaccgcctgtggtcaaatcctagctccactacttacatgacctgggccagaaacttaacccggctgtgcctcagtttcctccctctataaaacagggaaatttatagtaattaatctcatagagttataaggattaagtgaagaaatccatataaagtgccttagaatggtacttggaagagagcaaaccctcaataaatgttagctagaatttgcagatgcatacgctttgatttttttccccaaagttcccaacagatacatagttagcaagaacaaattttatgtgaatggtggtgctactatagaaggaaaagaaaagggagatgtagatacaaagccttccattgaacaagctctttagattagtgatctcctagaagacagcacacaagtcggtctactgtggtgtgggaagaaaaatactgtaacttccgtctgccatttttattttgtataattatatggcattagaacagaaaataggtatgtatgtacatgtatatagatgaagacgaaatgcacgctcaaaaagctttacaaatgagatgtacaaaagtttgggcaccactgctattaaggaagttaagattttactttttcttaaatatttctggtaaaaaattatgacaatgacgagcctggccaacatggtgaaaccccgtctctactaaaaatataaaaattagccagccgtggcggtgggagcctgtaatcccagctactcaggaggctgagccatgagaatcgcttgaacccaggaggtggagctttcggtgagctgaggtcacaccattgcactccagtttgggcaacaagagtgaaacttcatctccaaaaaaaacctatgacaataaaacgtcttggtcctatacatacagaataattcaacatgtatttactgactgccatccatgcttataagcattacaggaaaggtggagtaaaatgtgacaaaaatgcagcgcaggagctatctattgtctgtacaaagagacagcaacaacactgcctgatgtttaaaggccactgccaaggattccagtgggtttttctttttaaatatattttagatgcttttatttaattaataaattcaggaaagagcattgtaaaaagtgcattgttaaaattcacggcacttaaaacaagaatgtgactagtataaaacaagaagggaaactcaaatggtgagaagtaatcatacagtggtctgttatggtactaattcaaagtaagacttgcataaatgatagctgcggcatgaaccacagtataacttcacacattcattaaaaaggcaaatttatagttaaaacttcaaagaaaaagtactgataaaaaagttttaccccaaaattgcaaacaaatacattaaaagattagaagataaaaagcaccagacattaaacaaaataaaaataataaaattcaactcaaaaggtcccctttcagcaaatagtctgtaaattatgacccttatgtaaacagtgctaaatcaaggactttttagctaaatcagtacttttatctaaggcttcaatttgtaaagagaagttaccaaacatcaagtaactcttaaaatggtacacaggttttcaagctattggtttttccttcctaactctctgaatgagtttttcttaagtagcaacaaccaatctaacaactttaaacttagaacacaggatggcatcaaatgatattaccattattcaaaaacaaaataataccttatatcttgccatttttaccactgtgcttctgatttccccaactgccaaaatattatccccatcttccctttctgggaaaattaaggctctctagagagactaagtgactttccacataagtaataaatgtctcgaaagtcatctcccaaatcaaaattcagtttttaaaaaattattctgttcacagatctcccataatcttaaagatatttatattgctaaaagcaaataaaaatatatatatttcacccctaagtctgtttcctacttatcacaaggcacttaggacacctggtactggcaaaaagaaaaactccaagacaagttcctttttgttttgaacacaatacccagcaaactaaagacaaaaagcttaaactttagccagaactctaccactctaaaacgctattttcttttttgttggcttcctaacttgttcatgtacattttctctatgtacctaataaatgttttatgtgcaacctgtattctgcttttttcacttaatattaaactgcaaataacctttgcatattttttttcctgcatgtgcatggctacttcagcagttgcatagcattgtatcactctgatagatcatctgtctcctattcactcctgtcaaaaattagcttaatggtcagtttttccactttcattaatggtactgattataaaagcctaattttcaggatgaatgtcaaataacaaaaagttgcttttatgaaaaataattttaagttgtgtgtgtttaaaaatatgattatgaattatcagcaaacacgaatagtattttttcagatactaataatttatgtccctaagtcgcaacactgacaaaaagtcttgcttaagtttttgacttctaaaaagatggtcacataccagaaatgtcacaaaaatctaactaatcctcttgcaaattacatgtgagtgcaatttaggatatggttaactcaaagtgaaggtatcttaaaagggtccaatggctaatatggacccctgctcccaacacccactcctcccacacacacagaacagctggttcttaacatgcaccctttcaaacaaagctccctcaggacggccaattcagacagaatatcttattaggaagagagtgagagaatgttcacagacccagggacctaacgattcaatattaacttgaggaagacagggatgaggtaccaacctttgccctgaagcactaatgaacattatgttccactaggtattgtttccgtaaacataaatcttcctgttcgcaagagttgatgaagttttctataaattaaacctttttccttgaagatgcacactaacacttcagagatgttttcctcaggttttttgttttaggagaatgagtacttttgtaaagcaaatggtcagtctcccttgtccctagctcatacattcagacttctggtataccaagcttacttgaacggggaatacatctgcagaggatctggggggtggggggcggtgggggaacttccatcaccactctgaattcattcatttggcacaatattcaagagttgagaaatacagagataatcttgaccttggggactgtgataggttacctcaatcccacttattaggtggctagatacaaaatattttaaaacacgaatgcttccctctagtatttttgccttggagataaaatttccagggcaaaaatgtattcacttagaagctaagtatgtagtaaattttagaacatatttaaagaaaaatatagcttgaagtcaggaaggataaagaaaattcaaaatcttcttcctgaatatacacattcttatatatatatatatatatatatatatatatatatatatatatccttatatatatataagcttttattaaattacattttgtggattgagttatactataaagggaggggacaaatttcctttgaaagttttatttaatataccgctgggagtaaaattaaagggatatcgatgatttaagaagtgtgtttccatttccaatcccaacatttaaaaaatggagctggagtgctaaaggtggtaaagaagcatcatttcttcccttttttaaaatttcccacactatatcaatgtaccttcttataacccataattttataaaaactaatgtaactgttttccaaatgtccacgctgataatacagtaaagtcacatatttagagggtatgtctttggagcctgtgtgggcccagagcagtaactataatatacacccccaagtaaatcttttatttctttaaaaatacaatccagtcattatggtactacttaatagaatgtcaagcaacattttactatctacacaacccagagattcaccaaattactctacttctcaaaaatgagcaagcagttcccccaatatccaatgacaaggtccactaagaacaaacaagtagttcaaaaccagtcacaatccaactacatttatttacatagtttggctaatgtttcacaaagcactactctggaggatctggtattaggcacagtacttcataaagaatatttcacttcataagcttctgttttataggtctggttaaaaaaaacaggatttagaaattttgacatatttagaaaatacttaaatttgagtaatattcattgagatcagtatttctcaaaatctgtgcccaactagcccaattaatgctgttgcgaaaaaaagggatctacagtcggtaaatttgggaaatactccaagctgtatctcctttcgaaaattcaaaaagcattaatatactaaaattcattacatttctgttttttaaaaaatgtttctttaacacaatattttctaaactgatttggactcaagagcaccccccccccattattttttagaagtgcctactaatctcagaagtagttctccatgtaacatgttagttatatgcacttgaaccacaatattctagcaaatctgttaaagaagagattgcaaatgtggggccccaaatccaaattcaacctgccatgggtgttttacatggcctgtataatatcttttgtaaatttgtgtattagtgtacaaacatttcaaaacttgggatatttaaaataaaaatttaaaagatcagcttttcctatagaaggccctggttgatctgaactcacctttttccagcaacaacagtcagtgggcctacagaggcccacaatgcctttttaggttctccagctgccactgaaccagtttgctgacacctggccccagctccataatggaagacgttagggcacgtttagatgcttgaggagaaaagtcaatcgtcaaccagcccatcccctgcagtctacctcctccaagaattctgcacgtgacccaggatggtttgtcaaggacagtccctgtttacacccattgccctggcatatttaacacagccaccttcacccttgccttcttttgaagaagttaaatgtacactctagctgtgaagctgtcacagaccaccctgataattcactaaacttcctccacccttaagtcccacggatgttttaaaacactgagtgtatccttcattactttccagttgtttcatgtaagtgtagtggaaacaacagagacgagagcccagataacttggtctgcattcaggctctacctcggaagggctctgtgagttgggtatgtctcctactccctttgggattgaggatcttcatcccactattttacagggtgaatgggaggttcaaagatggagcaagtgcttggtacatagtaggtgctcaacaaatagtacttatcagttctgagactgtatctccatgaaattatgactgtctctcacacatctcttatactccaaatggaatggttttgggttcttacagtaaatagataacatacgtggtggttgactgatttgctgatttcttccctgcaaaactggaaatgtccttgtttcgattcccatgtttcttatgccttccctactcctctcctccccaattttggggcaagtggtaggaaggccttttccctatttgccccatcgattccaaaaataaattccagaggagcatgtgtccatttgcttatggtattttaattttttgatggctgggggtaagaagagaactctttaaagaaaaaaaaaatctccccacagagtacggttcacaaaattcatgacctgagctgatttgagaaataacaatctgcctctatttcagaaaataaagtgatgactcactcactaagatgggctgaattttcttcctctgtgctttgggatttctaaatatcagagaatttcccttgggattttccccaaaatctttatttgctcccaacaagctttaaacaatcttctattttctactccttttaaatctgtccccttttattttagctaataacaagttatttctcacgagttccttctatgaaaagaaaacctcaaagtggatgctaaaatgcttaaaattcactttaaacccttgccaggcctcttttgtgagactacactgaaatcaccctggatgcaaggtctctcctgctgactttgaagtttgtagatggacaaaacaaaacaacaaaaaaagcagggctctgatccaacaagtgccctttgtgggctggttatgactgtacaaaaatttcaagtaaaattggcataaattagaaatgctgttctttaaaacccaacctaatgaaccatcattatcttgtcatgctagctgactaattagctatgccccactgcctcacatgacttccaaacattttagttgcttataatggacaggaaggggcgacagtgtgtgcaattctacaatgtcttcacttgagaaagaaagtataaaaggttagattttaattcaatgaacttcacacatacaggccaagagttctaagacaagcaaactgtacctttgtggataatgctcatgaggataaataaatactaaggctttcaaattaagtgcatttatctatcagtcataggcagcaccgaaaattattttaaaattccttgccaagtgactcttctctcttccaaaaactttagggaaaatggataaagaatatgttaacttcctattctttttgaaaagaacaaaaaaggacaatgttgttcatttatacattgtccagttatgggaaaaaacccattaagaatctatgtttttctttccattcagtagttattcccaatgtttcttgttatttctgtgacagtataagatctttacaatgtaaggtgtataataatgaactaatagatctgagtaaaacctgagagagtattcacaacaggggtgtattctataccatcacagtctcttccaatcaaatcactgtgcactctgattgttgggctactagaccataaatgagctctgtgccattctcttctcttatactcactgcagttcagcctccatgctaacaatgttttagccacttttctcttaacagccaaaagctcatcccatcttactgactaacagagctggtaagaccttagaggtaacatattctaattgccatattaaaaataataaaaaagcaaaacctgaaatcctgagaggttcaatgacttgcctaagttcacataacttggacgggttagcaccaggactaaatctgggtgtggctcccactcctgtggcttctccctctattgagatgtaactggaatttcagactgtggggagcactggcccaggctagcaagtaagtccctcagctcagatacttggtggatgagcctcaaaagcatggatcaatttggcctctgaagggatccccagggtctgtctctatgtgccgaaccacttgcgctctccagccagtacactacagtataaacaaaggaataccagggcacatccagccacgggatgaacacaggcactgaagatttttgggagaaagaagttttatattaaaacagacataaactatattgtggtgcataaaaccaaatttgcttttccccccctcaagataaaacactgtatttccaggaaatttcaaagtctcccagggtctttcattcctcaatcaactttacgcagagatgcagtccacatttattcaattatatattctcaaaaaacgtctgtggggagaggtcaattactagtcacagaccccactgtgaggaagccatgccagtgagactgtgaaagatgattaaggaatctgctggcccctcagctcctgcatgctctctcatattccaaggatcccactactctgaaagtgattccagtttaaatatatgtgtgtatggcgatgtatgtgtacacatgacatcatagcccctaaacacaggccagttactttggtgctcaaatgaataaataatgttctgaagggaaaagcacccagatatgtaagcctccatcatggaatcttcctaagcaactttcaagggcatttctgcctatatgctacttgcacctaatgtgatgacttaaccacccaataaattccaactctacttccagggggtaggtttgaaaaggactagaagggagatgtagggtggtgggaggctcggaaaatacgggaatggggtgatgagtgagcaagtggcttggggtaggcttagggaaacccagggcatctttgattgtgagtaaagatgaccaggaagacctcatacaagagatacctaacacacactctggcccatctaaattagaggctgataactcctcaggtggaagtaccctgaggcaatcatatagtcaacagagagtaagaactctgatacacaatacaatcttgagagttcatgcaaatagtgtgagtgcctacatggaagcctgtgtggaggggggcaagggacctggggcggagagattctgaaggagttaggattatagtcaagggatctccctccctccctatgttagtttttgttcttagttctatgactactgacagttgaacctctccccaagctacttcacaattcctacatatcatatatatataataaacagaatgaacaaaaggaatatggtaaacaggtataaaacttaactgctagacaatatataaatatatggagaatacaaactatgaatacttttttcacttgctaacaaccagcatatgagggaaaaaatgtattttatacattgtcttcatgtttccagtgctattaaaaaagggagtaccggctgggcgcggtggctcacacctgtaatcccagcactttaggaggccaaagtgggtggatcacgaggtcaggagttcaagaccagcctggccaagatcatgaaaccctgtctctactaaaaatacaaaaactagccgggcacggtggcaggagcctgtaatcccagctacttgggaggctgaggcaggacaatagcttgaactcgggggatggaggttgcagtgagccgagattgtgccactgcactccagcctgggcaacagtgagactccatctcaaaaaaaaaaaaaaaaaaaaaaaaagagagagagagagagagagagagagagagagagagagagaacctgtggaatttcagataggttagacagaaggtttattcactactctctcctcaagtgaatgcttgaggtagaaaataattatcaagtatgaagaaagtagcctttgaatgttaactggaattcctagctcctcaaatgtctttaactaatatttagactaaaagaaccccttactttccatgatccatgttgggataaagggtataacagaattttgaaaatatttataaaataggctccattgaaaattccccccaaaagctctaagagagcagacctcaaatacaagtttattttcagatgcattattaaatgcttcacattttttacttcagcagaagcataaacacaaaagcctgttccatgaccctaaagacaggatttccttgaatgacgcgctaatgaaaaatgcaaaccagtggaagttttgactcattgcaccagggtctgcaacattccaaccaaagatctgccctggaccaagagagaaatcactcctcaaatcaaaagttacccttaaccccttacgttgagaatatttctgcttttgtacaacatggaaacagaaaaagatccatccccagaaatacctgatttttactaatacgaatatgaatttactaatatgaatagctccctttgacttggcatatagtgtctgattacgtgtgttgatcacaaaacttaccttcaaaatgcccaaattcagagatcaggtggccaggttctggaccaaagggccacacttttctcctagctatagctaactgaaccagggaaggtagcatgacccaaaggcttcccagcaacccaagatgtggctggaggaaaaaaagatgagctgggccagtcagatcccaccctctcaggaatttgaactagagaagagaatttgacagagaagagaccatgatgggccatgcacaaattttactgaaggaacacaaactacaactaggtgtagaaaaaagatgcaacaagcaaaggcaagtctgggtacagcatgagtgtgaagagaacaaaacataaatacaaaaaagaagacatccttgagagacaccaggaggtggctggaattaatcccccaccaaccaccacttttgagtaagtttaaatgagcctttgctcacttagggagcctaactgaaatggttctctctgttattttatttaagcctaaaaaccctatgaagtgagtattattaacctctgcaggccacagagctattaagtagcaagatcagggaatcaagctcagcaatgtcttgctctacatcctagggcttattcaccatgctatatgcattccacaataacaacttccagtgccttctaccaactatgcacagagggacactttacatctgttttacaacaaatttgccttgaaaagtgggcatatttcacagatgaggaaaccgaggttcagagcagttcagtgtgtctaaagtaacgtagacaataatgacaggccaatgactcacacacattcttcttgccacagacctctgtggtgcacacactgacaacttaggttctagcccctgttaaaactagtgaggaggaaaaaaccacaactggaaaaggcagaggattcctaaatatgatggacaggacatggtgtggaggtcaacagagagacacaacacacatgtctttcttgagtgctacctccagataaggagaagagaatgaaatttcagaacatcagagatgggcttaacctaaaggcaaatcaaatcaagaatgctagctaaacaacggaggctcctaaataggattggaaatggagagagaaaagtgctgatgtttcatttcacctggtccttccatggttgacctgtcagaaaacgctgctgggatctatataggatcctgtggtcaccagcactctgtccagatggacacgactctcaggccagccaagtcctctcagtcagcaaaggcagtcgtgcgtgccaggcagctgacttggctagcaggacttatcctccctttcctctgcctgcttagataccaatagtgcttggaaggaaaagtggcccaagcaacacctctgactgtggaagcctactttgtctctcctttcttgatcaatactagcaagcaatggttatctaagctttttttggaactataactgtattcttgaaatgttaccagatattcacgcacaacatatttcattttgtttcaattcacttcactatgtgctaataaataatgtgtttgctcctcatcctcaacccatgaatatgaacatgagaaagggtgaatccttcccttctagaaacatgccgggtgacagtgctggtgcatcacaagtaaaccacaatgtcaacacacgatgatcactatgtacgcaaaggggttccagaagccctacttgggtgagtcagggagaatgtcctggagaaggtggcatttcaccatctttgaagagtaaatgacccccaagaatcaaaggaaaagaaaaacatcttaagaaagagggaggaacacaggcaaagtatgggaggagaagctatgaagactaaaattactggtgtacaaggaagtggtaaaaaagaaaaagatctttcaaagaatattgtgaactgagccaaggatgtggcccttttctcatggcaacaaagggctgctggcagctttaaataggaactgtgatgggggagcttgttcccttcagttccccagagcacctagagcaggcagaataacaggagatgctcataaatgtttctagaagtgaatgattaaataagcaatcaggatttgggagggtgtcccatcatactttccccaaaacaagataaagaagcaaagattggccgggtgtggtggctcacccctgtaatcctggcactttgggaagctgagatgggaggactgcttgagcccaggagcttgagaccagtctgggtaacatagcaagacctcatctcaactaaaatttttaaaaaagtaacagggtgtggtggtacacacctacagtcccagtgactcatgaggctgaagcaggaggtttgtttgagtctaggagttcaaggctgcagtgagctatgatggtgccactgcactccagcctgggtaacagagtgaaaccctgtctttaaaaaaaaaaaaaaaaaaaggtcaggtttggcagctcacacttgtaatcccagcactttggaagattgaggtgggcagactgctagagcccaggagttcaagaccagcgaccagcttgggcatcatggcaaaaccctgtctcgctaaacaaaaagtagccaggtgaggtggcacaagcctgtggtcccaagtacttaggagactgaggtggggatatcatctgggcctgggaggtcgaggctgaagagccaagactgcgccactgtactcaagtctcaagcctgggcgaaagtgaaactgtctcccccgaaaaaagcaaagaaggacttccagtgttacagcataaagcacacagaagttctggataaagtatggctaacatccatagtgagtaagcagtaagcatgtgaggtgattttgccacagcccttttccattgttttggtaacctaagggagcttaggtttcaacactcttgcagagacagcaaaaaatgacccacaggtgcggggttgaaacttagattccctcccaaagttggacctcttgagggactacaatctcaatgaaaggtgaactagggaagagaaaaatccacccaccagcacagagagatgcaagaaagctggtctgtctctaaggtgggggtaggagtgaaggtgcggctggaggagtctgacctgagattacataactagtggtcagtgattccacctgagtggaatccactctcaagctgcaaagtgattgtatacaacaggggtctagacattcagggatgaggggaatcatatcagtgacttaatctcaaataagtggttgtaggggggagggttctgtgtactgtacttgccatttttcagaaagtttaaaatcttttaaaaaatatttttaaatgaattaaataagcagtttggagctggaagcaccccaggagaatcaaatgcaaaaccactctggaaggtaatgactcacatcaggccatataaatttcccacagagaaagccctcctgataacgagattaccttccaaaaatataaaaacatgaaagaatacaatctaccatgggagagaaccaacagttataaaaaacagaactaatttccccaataatttgatttaatacagttactgaatacatgacacaatttgtaaaaataaagacctaaatagtaaaataaaatgagaataaaaatgagaaaagaacaagacactatgaacgatagacagatataaatacacattaagcaggtctaaaatataaaaaatatgtatcaaaggaaccattaaaatagctgatgagagaattagttaactggaagatatatctgatgaaattatccttaaaatgaagcacagagaaagaaaaagtaggataataagtgaggataagagacatagaagatagaatgagaaagcttaatattaacctaaacctacaggtaccgccgccacccaccccctcaaaaaaaaagtagtcattaagaggacaaagaagtagtacagcccagagtgagactctgtctcaaaacaaacaaacaaacaaacaaaaaaaaaacaaaacaaaaaacaaaacaaaaaaaaactagtacagccccttttcatacactccagttggggaaatccttgtaaaaaagaatctattgctcaactcaagcctacagttaaccctagcgacagctcctagatctaatgaagttcaaggaaaacaagagtaacaagagctatagtagtcaagcaattcatggaccttgaagaataggggaataaatggtatgttgtgatataatactgacagctaagacttactgagtacttagcctgtgcaaacactgtagtaagctctttagatgaagaatcacattagatcctcccaaaaacccaatgagatgggaataagaatatgatgatgattttacagataaggaatgttaagtaccttgcctgcagtcacacagcaggtaaatggaggggctggaagtcatctctacagctaggctcttaaccattctggtatctcagcagaacccctctcccttgataaaaatctactttgtaattaataaataaattacgtgttgaaggaactcctctaccctatgcttataaaagcattgtggtcagggtggaatatcctttgcccattgggtagaatattttccttcacaagagtagggaacttagttgtgactgatatattttctccttgagaaaatcttcccgtaagtagtctatacaaggggatgttgggtgaggccctctctctagagagaaactcaggaagtgtccagcccagaactggtaggagcagctgaaaaagtagtctttcctaaaaccatgaaccttctttgtggctagtggtgttacacaaagcaacatggcagcacaagttccataaaggtggtgctccattccctctgtccaagcatctcacttccatacaccccaaggaaattggtcactaggagaaaagtggctaataactcaaagttgattacagatctgatggtatcagccaaaatacagacacaatctctgcagatccagtaacacagaaatgatttagtaaattaaggaacatctctatatgatgatattattatgtggccctcaaaataagactgtataggcctggcacggtagctcatgcctgtaatcccagcacttagggagactgaggcaggtagagcacttgagcccaggagctcgagaccagcctgggaaacacagcaagactttgcctctacaaaaatattaaaaaattagccaggtgtgatagtgtgcacctgtagtcccagctacttgggagactgaggtgggagaatcacttgagcccaggaggcagaagtttgtagtgagctgggatcatgccattatactccagcctgggtgacagagtaagatcccgtcttaaaacacacacacacacacacacacacacacacacacacacacacacaactgtgtaactatagagcaatatttgtactattttaaagaaaaaaacgcaaaattcaacatggcatgtatttgaagatggtaacggttaaaacaatgtatacaagcaacaaaaactaaaaaataataactaaaaatagttgggttagagtagtgggatggtaggtgatcttttctctccaaatatttaaaaaattatattgttgcatgatatactacatttagaggggaggcattcaggctccttgatagcactccagtttaagaatcatttgcagtctccacaaaattatactactgtttgttaaacgaaattctttccttgaagcattcccccatcaattttgccaatgttagcttacattatgcaggacaagagcaatatcaagttacttaacatgattagtgaaatctgagggaggaggagggagggtggagaaggaacagtcaaaggcacttaaactactaacaaaaaaagtactgtggcttgtacataaaaccattattggcctccataaggcattatcagtccaataatacatttctgttttagacttttaaagaagtgtacttgaaaccagaacaggccttgaatttcaaatacatacaactaaaggaatgctgcagtgggagaattaaggccaactgaaattggccttttgtctaggatgcattctttagacttaagaaaaaggcagagtctggtttagctgtggataaatttgaaagtaaaatccgaggtttgcagaattacccacacacccagagagagaaggccaatgcagatttctgtgatacagtttccaagtaaaatagccattctgtgacctgactgtacctctagctcgaaggaagcaaacaaaaaaattgttagcaggatgtcctgagaatacagatagtgacagttcaagtggctgtctacacatgctcacagggtcaacagcaggaaagaaacaagaatgttaaacttatgtcccaacagattaaactgcctcccagtaatacatgccacctaccaaagtccctctccaagtttcatactgacagagtggtcatctcagcttagtgtagcaaacctaggttttctaggttttgataactatgtgtgactgtctctttcacccctaagggggtcactattagatgaggcactgtcctgggaaagttgaaaggtacgtaaaggtcagggtctctggttatatgaacaggcctctggattcatgcaagggtagaattacttttaatttttgtcttatctggtctctggtacctgcattagataaatgtgctaagtgtgtgttccaagcatccaggatcacaaaattttgaggcattcgttccaagttaaatatcaggccaggcatggtggctcacacctattatccccgcactttgggaggcgaaggcagttagatcacctgaggtcaggagttcaagaccagcctggctaacatggcgaaacctcatctctactaaaaatagaaaaattagccaggcgtggtggcccacacctgtaatcccagctattctggaggccgaggcacaagaatcgcttgaacttgggaggcagatgctgtagtgagctgagatcgtgccactgcactccagcctgcgtgacagagcgagaatcttgtctcaaaaaataaaaaatcaaaccaaatcaaataaaaagttatcaaacatttacaataaagtaccaagctaagtcactttgggcccatgtttccccctccaataagatgaaactttttcttttggtaaagatcacactaaattcacttcattacccattaacatacattgtgacctgcagtttgaatacttctgcagacccttataattctgatgattcctaattctaacattctttctgtctgatctgtgtgatctcaaggaatcagctctgtatgtaaaagtataaagaaataacttccctcatttaaaaggttaattggataaccagtgtagagacaagtaacttataaattcaaagcttttcattttgctcatattttgctctatgttcatagaaactgtctttcaactaaaacatgcataagaacacaaaaactaaaccaactaggctaaatcttcatcctgtatgtttctttgcaagaaggcaatttggttctaatatttgagtttaataaaaaacaaacaaaatctatcctaaacagaggtacctaaagaaggtaattctgtccaacaggtagaagctgctgggaaaaaacagtccttagaaaagagttacagattttagtccactgtttctctctacctttaaaagccatttccctcatctgctcaaattaatttttcctaatgaattgagttaatcctccttttttgaaacagaaatctttcctgtaagtattacctgagaagtagttcaccctacagtgtaagatgagtcaccagcacacagaacaagtgctgaacaatccacttggccaaacaaatcacactgggggcaatctgaggatcacaccgtcctgaaacaagaatggctgctcctggtccccaaggatggcccactgatcaggagagcctgctgccgggctgctctgatttggtctcacttgccctgcaagcaacaaatccttctcattcccaagtctttattcttccaatcagcagaggggctgctcgctcctaaaactgaactcgaccagaagagctatactaacaagtgccttagacccagaggaaaggatgatgcttcagcacgtgtcatgttaaaggggcagtttatcctatatgtaccttcaacctcactctaccctttttaaaaaaatcaagtacaaattattctgatgtgctattaagacactgcactgcttgtaggccacacagttccaaggaatttgtttttctttaccaagaaattatatataccttttacatagttttgataagaagattatttaccaccctcaaggaaaaggagagtaggaagtcaaaatcatttcttccatttctacatgtaccgctcagatgcgtgggctattcagctaactttgcaaattagcttccaacacctaccaacctgcatctccctatttcttggtcttttgtttttgcatcttttaggagtatgatacaagccccaaggttttttaaatgaaactaaatgttaaactataaacgatgggctgatcacccactgaactaaacttgctttcattaccaggatttcgtatcattaggaaatggttcccaatgaaactatacattttcacatagtcatccctgcttcaaaaatcactaaatttagattatcattctattctctagtatcctgtttatgaagattgtgtgccactctgagctttcctcccattttgttatttttataatgtataaaatctttatggaaataaaaaaagtcatgttttataatggaaggggaggaagcaagacttgctgtctcaagttgaatgatgaagaaataaaaaataaaaataaatttaaaaaaagacttactgtcactaaaaggctgcggtaagctccagtcccaaatactggggaggctgagacaggaggattgcttgagcttgggagatcaggctgcagtgaggtgtgatcacaccactgcactacagcctaggggacagagcaagactctgtctcaaaaaacaaaaacaaaaaatgggcaaaggacatgaatagacataaaaatgaccagcaggtatataaaaaaaaattcaacatcactaaccttcaggaaaatgcaatttaaaaccataatgacatatcatcttatcccagttagaatggccattaaaaacaccaaaacaaacaaacaaaacccctatgttggcgaggacgtggaaaaaaggtaactctacacatcgttggtaggaatctaaattagtacagtcgctgtgaaaaagagtatggagatctctcaaaaaactaaaatagattcatcatacaatccagcaattccactatcccactactgggtatttctccaaacgaaaggaaatcagtatataaaagggatgcctgcacccccatgtttactgcagcactattcccaatagcaaagatatgcagttaacctatgtgtccatcaacagataaatggataaagaagatgtagtatatatacaaatggaatactatttgaccataacaaacaataaaatcaagtcatttgcaatgacatggatagaactggatgtcactatgttaactgaaataaagcaggcatagaaagaacaatatcttatgttctcactcatatgtgggagctaaaaatgttgaggtagaaagtggaatgacagatactagagactgggaagagtatgtaggtgggagagagagagaataaagaatggctggttaacgagtacaaacatacaattagagggaataagctctactgttcagtggcagagtagggtgactacagttaatgacaatatatcgtgtatttcaaaatagcttgaagagaggactagaaatcttcccaacacacagaaatgacaaatactcgaggtgatggataccctaaataccctgacctcataattacacatcctatgcatgtaagaaaatttcacatgtaccccataaacatgtataaatacagtgtatcaataagaacagaggggctaatctaatggagaaagataaaatcctatcactcatttaccaaacaaatcaacagatttttttaaaggctagttttagtgttgtaattatcatttcttatcttaaatctaatatgaagaaagcccatatgctaaatctctttcctttctgaggaaggagaaaagcatcaaaatcaattgaaaaccttgaagttcagcggtccctcccaaggcagggtcacgcctgcttccactcaaggtctgcagaaggggaaagtaaggaagcaaagtagcaggaggcatcagcaaggaactgcgggggacatgtggactagaagaaaaataaaccacatccaatacactggctgtgcatcagaattacttgggaaacttgctataaacacagcagccaggcttctgaacccaggagcttgtattaaggaggagctcacaggatcttggtatctgcttctctgggtatctctgggcatcctgatggaggttgtctacaaacctcacttccagaaaacctggcttataatgtcattcctaaagatgacagagctggtgagataggtcacacttcgaggagaacaaagtagtagtttcaactggtctgtggtgcgacccagacattagcccacatgtaacactccccaggtgattccaatgggcagccagggttaacactgccctgtctggtaacatccgccacatagataaaaccttgcctgttctcatttaaaaagctcatcacttcctactcccaagacttgttcaaaatcccattagtcccagcatcctccataggatgaaggggggcggaggagctggggtccacgagaaaagtaaagagacctgagttctagccttggctcagctactaactggctttgagatcttgattctcagtttccccatctccaaaaaggtaatgtttgcaataaattcctttagaatgtaaaagtctatgactcacaataccttatataatcatttttcattcttctcatactaatgtatacctccctgcctgcattgctttcccttggggaagtaccaactcaaaatgacagcaagccttgaaattattagaggatgacaaatgactgatactatgaagatggaagaagtggcatgcatatcaataaggcatgaaagatggaggttcaactgggccttgctggcatttttcagtaagtccaagttttcacttaccattacggggaagttttgttttggaggaggtgcagaaatggggaggttactatgttctttggtagagaggagataatagctggtaaagaaccaggctgaagaatcaaacagctgtggtttatggtctgaacccttgcaccagaccactcgatctaccttaaatcctaaatggaaaacaggtaaggggatacttaaccccgccacacaatatcaacttgacatagcaacctctgcctctcttctcactatcgcattcattgttgaggatgtatctttgagaattaatactggatgacataatatttcattcaagtccgagtgatcaacagaagttcacttccttggaagcacggacttcttttccttagcagagtaccaggcacagagcagatgtatgctgaagtgaactgaaggaatctgtgttctctggcatagaatcttgatccacataaagccttcctgaataccaccagtacaggattggattggctcttagctacacctactgtagttcttatttctgtatacctgtgggtggaaatggaggataaacctctcttcgcttttcctcatagtccactacccttaacttggaacagaaaccatttagtgagacataataagcatagactcttgagactgtagctccatattcaactcctagctgtgttattttgtagctggatgaccttgagctacttctccaacttttttagagtcttcatctgtgaaacaggaatgaataatcctaaccatctctagatcttagacaagaatgaaatgagagcatatacaaagctctgagcactccgaaggcactcaacaaatggtagctccttttcttcttccaaatgctttgaaacccacaactgggagaagtcttcagatgaagttatattcctggccctaacagaaagaagttacaaatgggtgaacaaagaagcctgtaattgggctttccacaggtcaaagagagctaaagaaagccactaattcacttatcaaagattcctggaaggcagtaataatggctttgggcagcagcacttacgtactttcagatggatgacccaggtcaatacccctctctcaattaccagtcccctgaggcgtcccagcgcctgcacacaaaagctctcctcctggctagcctaggaaggagaaaacaccttctaaacagaggtacacacaggagctaagaagtgaaaagggttttaaaggggccttatcaacttataaagcaattcgttcaaattttactggcaggatgcaacttcagttaaaaaaaaaaactatgtatataaagattcttgcacaattagagaaacgtaagcattttgatgcttttaaaattatgtttaaatctattatattttctaaatattatccaaataaacataaaaatgcttttaaaacaaataaggaggccatatcagagaaaagatagatttattttgcttttttgttgtaactctccaatggaaaaggcatgtaaaaaactacattcctcacggagaacaacagaactggaggagaacgtaaaccgttacaaccaagtagaagataataccagtcacatttttttgcagaagtaaaggtactgataatgaccggacttcatcagcggctccaagaacagattctatgacagagtgatcaaggaaagaaccaagtttcaaaaaggcaagcctctttaagggaagagtatgagaaagattcagcccagttccatgaatggatgctttgccctgacaaaagatgtcacaaaaagaaccctgcgggcctgacctctaggtctggcattgctgctaataaattatgatgttcctgggcacagcaaactcctagagcttcgttcctcatttgtttaaaaaagaaggctggggggcactgggccgctccagctgtaacaatctcttccatttcctctaagttcacaaagtgattccatatacattctgctactgtgacaaaagctacattagtctccattttataaaggataaatgatttaccccagatcacactgtaaacaagtgctaacaaggactgtaactcttaactatgaattcaaaatttaggcttttcttctactgtagccaatcatggactacgaagaaccagcttgctaagccatgtgatggtctatgctactgacaggtatcctcagacaaaaaagctggcatttgtgtcctgtaggctgatcccagggtcttctgtgacagtacctcagccacagctgagacaatctggagtaaatacttagcccgaattctgaccaaatggatttgtgattgggatttgcaggccaaacgtgaactgagagccaagactgcaaacacacacacacacacacacacacacacacacacacacacactctctctctctctctctctctctctctctctcctctaacaaaaaagctccatggcagcatgagagaccctaaactatgagaaggtggaaagtgtgagtcaacagaaattaaggaacagaaataaagggacaaggagagcagtgcactcacagtgccaggagcggtcttggcagacacagaaaactaagtgaactcaatggcagacgatggaaggactctgcctgctgctgagggaggtcagtccctggggtcccttgtccatgtgcagcctagctgactcacaataggtacggctttgacagcgtaaccccaccctcacccgtccacatcagaatcacatgtgtgtgcttttcaatgcaggcaccgagggccccccatcccagactctccagatcagaatctcctagttgattacgatgcatgctctagctgaggaccacaggccacggtaacctgagtgagactggagagaaagcagctgccaaacagcgtcagcgagaaaggggaaccagtctgccccatccagtctggccattcacctaaaagatggtttcctgtagcagccacttggtaacgaggacaacggctataggcaacaggagaaaaacaccaataactataagccatactagttcttcatatccagtgaatttaagacaacaaaagatgaagcagatgaagttgagaggaaagaaccagaaagttcagtagaaaaaatacaaattcaaaatatgaattccatttttaccacatgaaaaatgtttagacaatcccatctttaaaaatgtaagcaaaaacaaacattgaaaactcctaaagacaagcacaaagtgacacagagttctcatgacagaaacaaaaaataagtgtcataatagtctaaatctaacagggcaccaagaagtctaaagagtgggaataaaggaagtacagatatagaaatggctttcaaatgccttaggaaacaccaccagcaagcagccattagctccaattgggaaatgatttctgtaagatttctcaaaagagtttacaaatttgtccccagattacataaatgtctttgccactcatattgtgtctgttgacgaagggctgtaggcgtttgtgggcccatcacatggacgtagcaggacagttttcagactgccagtggagttcacagagatgtagagagtggcagggagcctctcgggaggacctcatctgggtagagctcaagggagcaaataaattcttagccatgaaaggaagaaatccaaagtagtatggttctcagcgaggctgaagatttatttccctgtgccatgacaagagacctaataagtgtgttgaaaaccagaaaaaaaaaaaaaaatcaaagggccttataaaagttatgtaaattagtaccaatatccctcaaaccatgagttctttaactctctatgatgttagacagcataaagggaatgagcaatgtaaacacttactgctgtgttacacacgcttttcattgtagtaacatgagcatttcaaggtattgagtccagatctttaggatggacacgaccaaccacagaaagctgtagtcacatcccataatctagacatattttattaaattaaaagggtgtggcaggttaagtccaccactcctgtgctaaatgaaaaaaaaaagaaaaagaaaatatgaccctacctaaaaatgaactgcactttttgttgacatcaacagcgtcagggtggaaacaaagaaattacccagagactcactggcttctgtttcattagaaacacatgaagacaatatatgccaataagaaaacattctttgcaaaagtcttccatgcaaataagcctttctctttttttccttgatgcatcatcaagttttgcagctaagagtgcaaatattggactgggacatacgataaaacagtcgagagacattggacgaaaaaaactctaattaattcctgggatattttatccatatgcattaaatatcctttctaaatataaatacgcatgggtgaaacagaagagagggggagctgttgtttctgggccacccaacatctactcaccgtacccagtaaccactctgggggcagaaccagaattcaaatccatggcttttacctcttacttttaagtcttttcataaaggccctcacaattagagagtgttaggcatgtttacaaagcccttcctcatccattagttcattcaaaacaatccttacagacaagcaaggcaggaaccctcaaacccatttcacagatgaggaagctgaagtagaaagtgttattgaaagtgataccctaataaggtatcgaaagccatgtctaccacgggacagaacaaatcctggtccctctgcttggcaggtaaaagcaaaatctccaaaatcaagcccttgattcacaatgagacagagaggggaaaaaaaatgaacagaagtacacgaatcctacaccttcctctgaactttgtggttgctatagcctaaaagtacacgggggaggcacaggaaattactctttcctcatgtaaggtctgaatcatacacccagcactaggggttctgaagtcacccacaccttctgctgaaatctgcttctctgccagatccatggctgtcccacatggagtcttgaatatggcaacgagggaatgtgaggactggctcacaaaccgcagtggatgttaatggcagatgttagaaatccacttctgcagagatagttaagcatatttttaaatggagtggggggaatgcaaatcataaaagcagcatagtgcagtgaaaataaatttgcttttgaaacaagcgcagggttcaaattccagcttgggtgcttatcagctgtgtgatctcaaacaagaaactaacctctttcagctttagttccttcatctataaaacaaatagacttgactagataatttctagatctttctctattgtaaaaatattgtataatttctatactacagatgagaaagagttagcaatgtagtagttgacagagaaggagaaaaaagagaagtgaaggcagggaggaaagaacatagagcgttaagcaggaaaccggtccactaaaatagttaggggcgtccataactaaagcgaccctgagctatttacaaccttttgcctctcttgaaccaataatcaatataaaacctacaactaaaaagaggagatgggaactaacttttataaacatcaactatgtgccaggttagaaacctgagtctgtgtctcattcagcaactttgtactgtttaagaatacctcaaactggcacttacatgttccttattttatttggtcatcaaaaagagataggcagaggtagtgttcttgactattttgctgacaaggaaaccatggttcagagggatcaaggggcctttaaaacacatcacaaggccagtaagtagcccagctggaactgaacaaagatgattttaccagaccagtgcttgctcatattcctcgctgtcccttttctacctttacttctcatatggagtatggatttcaggagaatctagcaggataaaatggtagctgacctctggcctagaatacaagtttttaaaagtggtgtgtgatatattcaattgtgattatatgtcccaagaaactgggcattttgtggataaagtctacttgtgataatggttatggaatcttttgacaactagtcctcacaaatcagcacaactcctgggaggcatccttgacacacagtctgccacagtagagagcagtcaaccatgtcagcattttcagaatccagactagaactttcttagagcatgattcatataatttaataatcctactggactcttccagctttgagctgtagcattatccaaatcaacaaaaggcaatagaaaagagggagagcaatacatgctcatcagcgattctattagagagtgaaaatttgtaataaaatagtcagaattatccagttacttaaaattcagaacaatcagttattggggctgggaagagtgccaaaagtgaatttaattttctatgttagaatttaacacttcagtttttattgaaatttaaaaataaacaaggaaatgataattttattggttcattcttctgcttggtcattaatagcaccatttcatttaaccataaccaagaatccatgtcagtgatttgtctaacagtcactgatctgtctaaaaatgggtgagtaaatatgtttacagattcactttttccaaataacatgtaacaaccaacatgctgtttttccaaataacaaataggtttagagtacatatgtatatgtactcaaaaaacattatacttggtggctgtgttgtgtggtagaagatagcagaggtttgggggcagataacctggggctgtatgacactgaacaaggttatttcatctagataaactcaattaccttatctgtaaaactggaaatgatatgtaccccctcacaaaggatgctgggagaaataaataaacctacaactcaataaaattagtattagagatccgtggatcaacataaacaatgtttccctatcacttatagctttctccattgcttttaagtttttacaaatctctctatggtcaatgacatcatttcttgattttgtccataaagactgacatatgcttattaactaatttgaaaacttactactgggagagagggaataccctccttggtccttgatttttttaatcatgacagggctttctaccttctaagaacaggggtttatatctccaagtctaggtactgtaaatctacaactaagtactggtccagattttcaggctaaaaaacttatccaaagtgtaaaaaatagtttttttgggggggttaaaaaaacaaacaacttaatttattctgttttgcaacatatctatatggtgatatgtggggaacccaggaatcaacatacacaatcatggcatgtgaactcattttcctctaagaaactctgcatcttatattacattggtgcaaaagtaattgtggcttttgccatttaaaagtaatggaggctgggcgcggtggctcacgcctgtaatcccagcacttcgagaaaacaaggcaggcagatcacgaggtcaggagttcgagacccacctggccaacatagtgaaaccccatctctactaaaaatacaaaaagttagcggggcaaggtggcgggtgcctgtaatcccagctactcgggagacttgaggcaggagaataacttgaacccgggaggtggaggttgcagtgagccaagatcatgaccgattacactccagtccaggcgacagtgcaagactctgcctcgaaaaaaaaaaaaaaaggaatggcatggcaaaaatcgcaattactcttgcaccaaccaaatatatatgttctacattttgcagtatcttttaattagaatccaatttgatttaatcacactgtcaaagcagaagtgtctaaaatcctgcaagtataccatgttttagggatctaataatctatatctgggaaaccactatttccctacttattttgccaaataggaaaaaataaagaaacataaaatatattgtgactccacacttgcagatgttttagtcaaaactacaaatcgcttttgcatttgtatattaattcctccttttagaaatggcttaattattagtctattggtaaaaacaaatcaaaatatttttgaaatttcatctgaaactgcttaaggttcaccaattgcaatacgactgttaccatctgcactccacgtggatactcattattaatcatgatgtgtgaatgtaactgcaagcacttaataagatccccttttggcaaactgaaaggcctttcagctctggcatgtgtacatcaaccatggcattcaagccacaatatcaaaaccaatcactgatttggcaattacccaacaaagtatccacattattggggaaaatatatttttagaaagctgttatccctactctcataaaaattacacaaataatttgaaatagagtgtggtgggggtagacaactaaatgaacaagaacccaaaggatcataaactgaaatagttactggggtcaggaagataatattaatgagagaagcaaggttggcctattataacaaggagtgggtttcgctgcggcaaagttacaacaaccttcatcatttaagtaaaacagccactaattgaatagctttagctggcttttgccaattgggaaaggggatgcactattattaaatggtctatgttcttcaaacaagccagaaatccaatatttatgtgaaatttcctgaaatacaaataacagcaactaggcaaatttggtggagcaaacaaaaccttcatgggatggatttggcaagtgggccactacgttgtgagctctgcagtaactactgttggagagaggaaaaatatatccacaccagctggaaaagtaaggccctctttgtagagagcatggcatctggacttagccttaaaagaaggcaggatgccaggaaacaaacaaacaaacaaacaaacaaaaaccaaaaaaacactgggtacagtggttcacgcctgtaatcccagcactttgggaggctgaggcgggtggatcacgaggtcaagagatcgagaccatcctggcaacatggtgaaacctcgtctctactaaaaatacaaaaagtagctgcgcatggtggcatgcgcgcctgtagtcccagctactcaggaggctgaggcaggagaatcacttgaacccaggaggcagaggctgcagtgagaggagatcacgtcactgcaccactccagcctggtgacagaacaagactccatcacagaaagaaaaaaaaaaaaaaaaaaaaaaaaaaagaaggcaggatgcagacagctaaagaaggccaaacaaaggcagggatgtgtggggaacagtgtttcagaatggaaagagactaacttgataagaacagaaagttgtagttgagactggatacatgaggaagggtcagataataggatgccttaaaaccaggtctagaaaatcagatttggttgatgggcaaagtagaatcactgtcagtagatgtctaaattgaaaagccatgataatgtccaatgaagggtaagggcctaaaaaaatggtgccatttcaggacatgcaatcagaaactcatcagatgtaggaaatccccagaatctgtgaggaactaatctagatggcctaagagtgggtattgcactgactgtatccacaaaaaccttgtggaggactgggtatgtgatgaggacagctttttgttagactcatcatcatcacatccgccttaaatttccagttcactggcacggaggacagaggttctaatggacaaaacccatccctgagaagagattaaaatggccaaccgaatgtgtagggcgtcttgaaaatttgggggccctaaagaacaaatcccttttaaaaacaaaattctatccataaaacctggaaatttagtaataatgatccaagatctcaaaacattggagcaataaaagtaggaaaatgaaaactggacaaacaaccattctagacagtagtcaaaacgataaattgtatatataaatggattcaagtgactatagtgtaatttagccacaaagtatgaggttcaaatgaacccccataaaggcaaaaacgggagtcaaattgtagtaactcaacttttctctaaaggtgagggaaaacccatgaaaatttttaagcaggggaaagtgagctatgagggctgggctgaaaataaactaaaagggatgcgcccagtacagccaggatttatgaagataagcgtcaccactcaacaagaccaatggcttcctttggtttgggaaccagtgacaatgaaccacagagaccacatgcagactgtgatgtaggatgcagccactgggagggaggggtaatttagcaatgcagctgttaagtttatctctgtaatcactgacaaagcatgacagctttgcacagaagaaaaaaacatctttcctaatattccctccccccataagaatactggatctcctcatggggtagtaaaaccaatcattccttttacactctacacacacacacacacacacacacacacacacacacaccatactgagagagagagagaaagagagagagagacagagagacatacactcatgagtgggtggctgcccacaaagattggtcctaatgcctgtgaaacaggaactggaaaacctctcccatccacaccctatttaagacctaagaaagtaaaggccagtctctaataaagatggtcctagtggttccttataatttgagtcttccttgacagcaacactttggagtgaattagttcagagaacaccagacctaagagaaaaggaagacttggcaacccacattcattttcctacagcaagcatgaaaaaaaagtattagtaaaataaatattaagatataccagtaatgactttaaatagttgaccttccttgcagaactttcagaaacatacacaaataaaaatggaatactcaaggagttgtaaaccaccaagttggaaagaaaaaaaaacaaaaaacaaaactgacttggtgccagcctacaggtactagtgaacacagaatttcatgaatgaagagaattttatgtatgtcggccaaaacaaaatgatcttatcactagaaaaaattttatggtctaaataaaaccaaggaaaaacataattatgatcatatttatctattcaggaggtatctttttaaaaaatttgttttaattactgaaatgaagagagtcgtcatatatgtagcttcaaaaatattcagccaattgtaactctgacatctttggaaagttaaacacaacaggttggttttgtttttctgaaagctctgggaaagcatccatgattagtgtcaacctggcattcaaatttagctggaataaggctgttaccagtttttgtcttctataggcaatagccagactttctgtaaaaaatatgaaatatttgtttatgcatatcaccgtggaaagttttccgcctctggtttctgatgtaactttatcacgttctgttcctgctgagcgagtaccaacaatgttccaatactgattaaaaataaataaaagcaaaataatgagccaaggctttactggaacagatatcataaataatttgctacctgtcttaacttagaaaatcactgcctgctaacaagtttctgatatatctattatttttagccacttactgaaaacctactatgtgccaggtatggtactagaaaataacaggtgttatctccctcaatcctcacaacaaatttgccaggcagaattatttgctattttctaaatgaagaaaagaaggctcagggcacagtaatctgctcaagttctcacagtatcaaatggcagagtaggttttagacaccaggaccacctgaagtacattgcactgtttcttataaaacactagaaataggctttggcgaaaactgggccataacaaaaacctgctgcaaaatgaacttacaaagttattctcaattaactaaaaacaaagctagcatttatttcactgatgtttatctcactgcgtatatgacattctacttccattcacagtttaagtccatcacttactttgatataaaataaaaacacttcacaaaatcgggagtcacagcagctagagaactccttcatgtactgatggagttgtagttacagagggtgtctgaaggccagaattcctgagtttctaatcctgcttgagcaacttacttaatacttgtatgctctggttccttcctctatacagtgagctttgcggtgagggtttaatgagttaaaccatgtaaagcactaagaacagtgcctggtgcacaggaagtacccaataagggttacccatcatcatcttcatgctcatcacaccaggactggggaaaatgatcaagattcacagcatccgacatgtttactgagctttaaaaagtgtgcaactgcccaaacgaatgcacaaatgagcaaacaactttaacacctttgtgcttatcattatgaaatgatgagaagcaaaagttcacacccacagggaacatttatctagacatcagtttataaacaaggtaagatatgctaatggtataaggaaacacctcatagcagggagcgattcagatgaagaaggcccgtagggggtcaaaaaggcgaatgagcacaatttgagggaagacttcttggtggccaaggagggagaccttgaagagtactgctcagagaggagcagttagagcatttttagtaatggggccagaaggaacacagggaaattgactgttaagcagaattatctgactctaattgaacaaagctgactacatatcaccaagagttcaaggactgaactttacacatttttgtatattgcctgtccaaagcacagtgcctggaactagcaaataatagttagatggatgaaagtatagaaggatgacaggacagcttgatggatggatgttgggggataataaaagataagatagggtaggtaaggttacttcagattaggaagagcttgaacaaagggacaatgcagtatagatgatggcaccatgcacttactcatcagtcacaccctcctttatgaatattgtctttgttctacccatccatccacccattcacccactgaccccctcatccatccatttttgagaagtaaactgatttttggggggaggcctagttaggctaaatttctcagaccatgggaaacacagttcaatgcgatgatggggacataaagcctaacccacaaagcctaacagccaaggaaggcgagttctgtgggcaaatgcctcaaaccctctgcatttgaatttctcctctgcaaaatgcgtaagccctatctcacaagtttgggtgcaaactatcagacacagattatgtcaaaggccataattacatatttaatagaacattattatagcaactatttgtgccctttaacatagggaacgctcagagggctgtgtttgggttttgtcacctctatacccctagcccttcccactcagtctagcatatagcagagaccctgggaaggtttggtaaactgacttaacatttcaaacacataccctcttgccctgttaggtccctaccccagcctatctcttccccaggcttgtcctttctagtcacctccacgcacagtcaaccaagcacccatgcagggtgaggccatcccaaagcgctttcaaactgtgctctagtccgactcctgcatccatgctgcgtggaactcttctcccctggcaggagctccagctacacgcatcaagcaatcagtgctaggtgctcctgctaattaatgcaaatatgggaagcttatctcctcagccatgctggaagctgcttgaggcttttcatctgtggcttttttctgataaagctgaggcttttaatctatttctaacctttctggttccagtatttgacttcgagggcaccattcctcaatttgggtccccagaactcactccttagggtaattccattcttttacaagagctgatattaaaaaaaaaaaaaattccttgttgaaacaactgttaataaagaggatatctttgagaatataaacctccctgcaaatgcttatcaggacatgttttatttggaggcgcagtgtcctacctgcagctgtgcatttacagagcactgccagctcttacacattaactctaagagggaaaagggcattcagaagtctggactgcatatccattaaacaaatgtgttaatcaccttcaagaccctaagcagggcagtgtagaggacccagagacaaatgtgaaggagactctgtcctccaagaatttaaaatgtactaggcaagggcactatgggaagaagatggcatctgtactatggtaaaaccactgtggaagcacaggtaatctgccccagtaatctggtcaatgcaagatgttcacagcagcattacttatagaaggaaagaagggagggaaggacaaataacaatgtccaatgatgggagatggttaagcaaattatgataaattcacagaatgaaactgtgtataaccattaaaaattatacttaccaaggctgggcgcggtggctcatgcttgtaatcccagcactttgggaggccaaggcaggtggatcacgaggtcgggagaccgagaccaccctggctaacacagtgaaaccttgtctctactaaaaatacaaaaaattagctgggcgtggtggcacacgcctgtagtcccaggtactcgggaagctgaggcaggagaatcacttgaacccgggaggcataggttgcagtgagccaagttggtgccacggcactccagcctgggcgacagagcaagactccatctcaaaacaaaaaacaaaaacaaacaaaaaaaaaaactatacttaccaagactatgtaaataacatgggaaaatgggtatgttataatgaataagaaggcgtcagactaacactattaaacaaaaacatgcacagaaaaagcatcagtgtgttcacagtaagaatgtggccattttttccttcttcctatgttttgtattttccaaagtatgtgtgttacttttacatgagaatattctttaaaatttatttttaaacagcgtattcaaagggcacaagaatatcatatattcaaattttagagaataccccaaatccttagggaggcagctaccttgcagactggtccaaactttaagaatggaaaagactggggaggcgaagactggaaggcttcatactttaaaatgatggccctaagtcagctgtttataacttagcacataccattctcgaagaaaggatgttataaagagtggttatattcccagggtagcccatacagccaggtaaactctcaaatcacctgaagtatcttacttgtatccacaatcctttagctggggctggctgttttagaattcatacttttgtagatttcagaaagaaattacagtatacttattgtttattatacaacataccccacagggactagtgtagaactccattatcagattctggtaacacagtttttaaatatccagtacgtttctagtttagcttctaaaagcctcatgaaacaaaatttcatgtcaaaactcttaacatttggaattcagaacagcaaataacagtggacctataattgcacgtaccccattgtacatggtcatttatctaagcgctcttcctggtactcgacagttggcaacggcccgagaggtgtcatattcatctttgtatctccaatactagcacagcaatagcaacataaaagggtggtccataaatatctgcagaatgaataaatgaaatataatactgaatctatttgccagccacttcatactcctcacagccctctgcacttctcttaaggctcgcatattctactttggattagatgtcatataactgtgctactccgcctcctcacattccttccaactttaagtccttcaagggcagggatggttcaggtgaaacagcaaggcctacaacagtagcccatattccctcacatgaaatgttcagaactcgttaagcaaagacaccagattctaacttgggatgcccagaatactttctctaacccttacctagagatccaagattcctcttttctaactgtaggatccaaaccttcctggaaagaggagtgaccctgaaccagggctattatggtgcctgagtctagcctagtcgacatggggatgtgtgcctgatttcataaagaaccccttaaatccttccagccttccctcattccagtggtggtcattcttctcaggctgcagtcacatttataaagcttttcaaaatgccaaaccacctctaccaattgcaaatcacttgctgaactttatctgtggactatttccttgcagatgctctgaggcatgacaaatccttaacaggataatgatgatactcctccttcctctcctcatgcctggtactacaggatcaattttagtaccgtatcacacagactttcccctccttgctttgatatgctttaaagccactgagatgtggcttgggttaaagggagtaaggattttaagggttcatgcattcaatgtgccattccaatgaagaccttcacaagtaggagctactcctcttctaaaaccaaataatgctttacaggctaaggaacagaaaagacgagttgccaagttataccatttcaggaatccagttatcttgacttttcccctgaggcttgcctctgctgcagctaaaaatgaatctgctcagattcttgtatatattcacatacccctccagccaaaaaatgaagaaaactggtatgtaaatggaaacattacagaacactcttagaatgtgaatgtcaaattctcctagtgtcgaaaaatctcagagataaaaccaggtttgacacccaaagaaaaatgctggagccagaaatagacacttgctaaagtatacattctaagcatattaattccaggaaaaataattctgtaagacctaggccagacagctgcttgttcatctgcccctcatccttgcctccacatgtccttgggacttactgtcctcactaaggggaaaggtctgctgaaagtcatctcctgccacttccctctgagatgcctcaagaaagaaaaacagaaggtgtgtgatggagacactgacaaaacaataatacttattaccttcctatctccctcagggtttcggtgagaagagagatgaggggaggagggaaaagaagaggggaaaaggaaggggaagaggaggctgataagtttgacgagtgagtgagaaagtaaagggacataaatgagtggactgaataaatatgtttcatacataccttgaaaaaggcaaccaaagtccccattcacatagcaaggagagagattcactcttgcttatatttccaggcatgaattatttatttcattagatcccaagatgccatatgttaaagttctccaaactgtggaaacttgacaactcttcggctccctaaaacgccatttattacatttcactgcttacgaggggacactgaggaaaggtaatgtgcacgtattccgtaaaaactgcagctgcgcctgatgcttgtctattcactgtgagggaccagaccatcctcaagccccaagtgagcctccctttctttaaaatgctttcctaaaagctgctggagaggagctgaactgagaactgaactcgaaactgaagaatttgagttttatttcctaccctttagcttcctgcccctactacccttttggatgctattaaaaatctataaagagcagactatagggaaaaagaaaagaaaggcaaaaaacaaagtctgaatcatgcatacacgcattcattcacttaacatgtatgaaggaccaacacatgccagacaatggggctacaatggtgaagaagactctttctagatcctcaggaatcttacagccttgtctgcgcatgtgggtaataagatgtgcagttaagatggtgtgatcagctttgttaacagaagtatgaataaaatatgaatgaggaaccaattatctgcctgccccccaatcccatcccagagggaaggctttacaaagcaggggtcctttgagttgggctttacagaagaggaagtgaatgattagtaaaccaagggtaggaggagggaaatggcttgctcttccaggctctgaatcagaaacaaccacgaaactttccaagtttattgttcaagaggtgattattgcagaacgccattcctggtccagattattctctactataattgtctcacgttccctgttgtgcacctacacaaatgcaatggcagaaatggaggatttctctcatatctcaatgtggaaaatttagatggtgaaaaggaaaaaaaaagcaagctcccaacttcttggaattttaagacctcagttcaaaactgctactgattttactgtgtgactctaggcatgtcacataacctctctgtgcttcagttttattacctgtaaagcagagatgagatgatctcacaagactgttctgtgaacagagaaaaggatctatataaaaacattttaaaactcgaatgtactattattttcatcggcaatcatgccacctttattcagttagcagctcagtctgggaagccactgctcaagatacttggcaagtattaaacagtgagaaaatcagccctaattggcagccctgcttaacgactgacattcaaatgactccagaaaaatactcttgttcctaagcttaaagtctacagaattgccctttcttttccaaagcttgcttttcacactgcacataaatatctggggatctctttaaaatacagattctgattcagcaggtctgacgaggaggctcagattcagcattctgaagatgctcccaggtcatactgatgctgctggtccccattccccagtgtgagtagcaaaaaatggattcaccaaggctttccaaatcaataagtggttgccccaccaggtaagactggattcaatcacccaactgaggcagcattttaatttctggctcttttctaacttccaacatccatcgctcatgccccagcaaaccacttcctgaaaccaaactgcctcatgacatattaaatcagccttcagtcacagaggtgacaagacgtgctcaggctcaacccagcttagaatgacagtacaaggtccaattctgacagcagggccaaaagtagtaagtaaggattcccccacccccaccacaatcagccccagagctggctggagggatttccaaatcagctttgcacactatagcctcaagggtcaccatctaccactcaacaatgggtcattttctttagattattttcacaaatgaccatctatctcatgaggctacaaatgtttcttgtgtgaaggaccccatgtcccctattgtccagcacaaggctaggtgctcaaatatctgtaaaaaataagtacaaagggagaaaagaaatcaatgactcaccaacatttactgaatgtgcaccatgtgccttgcaatggcctggctgctgagggagcaacaatgaataaaacagactttcctcctgccactaatgcaatttgagcctctatgtaagagccaaatactctgctaatgttttacctacattatcacacttctcaattctcacaataatcttacgtaataggtattatacccacattttgcagatgagaaaatgggacaaaacaagcaacgttccatacgaagaaacaatggctggtatactaagtcttctccgttaatcaaccagagagagagggcatttccatccaataaccaaaatgaactatagcctttcaaccactttcaccacaagaacagttctgtgacttggaactagttctcgatgtactcataagactttcgaggttacttacatgaagtatttggtaatgagttctgaatgagggtaatgccacggagcgtcagaaaggtgacactgatttcccctggtgtacagtcacctcctctgtatcccataaagcccagccttcactctggccattcaacatatacaggtgagaagtgtgatacagtagaaataacatgagctggacagacctgggtttgaatcccagatcgactacatgtccagctgcacagtgacctttaactctctctgcacctacacaatggggacagcaatagcaccttcatgcagtcagaaagatgaatgagataatacatctaaagtatgtttaagtgtccaacacacagtggacttacacaaatctaagttctcttctcccttactggggttactgctttgctcctgcagtgggaaaagcatcaagagtcacaagtctttctcttggctaatgaaaacagagaattattttaactccagtaaagtcaacaaaaggccaattctagcagccatttaaagtcacagtccaattactgaggcaaattacaaatgactctttggtttaacttggaagaaaacagaagccattaaaaagatagtaagatgccttctttttaaaattaacatgtctggaagtaaaaaagatgaacaaagccaatttacaggaatgtggacagggttgttggattaacagcgagaggaataataaaaatgtcctaggctgggagcagtggttcacatctgtaatcccagtgctttgggaggctgaggtgggaggattgcttgaggccaggagttcaagaccagcctgggcaatatagcgcaacccagtctctacaaaataataaataaatgaataaacattaaaaatttagccaggtgtggtggcatgcacctggagtcctagctacttgggaggctgagaaaggagaatcacttgagctcagaagttcaaggctacagtgagccatgatcacaccactgcactccagcctaggcaacagagcaagactgtctcacaaagaaaagtcctaaattctctcccagataagtttaaaactctgaagatagtaactcttttttttttttcttcaaagactatcacattgattagccaggagccaccaatggaaagagcagtagttcctgaatcaagacagagagctaggttcaagtcagttctggcacttactggctgtatgacaaaaatccttcacttcactttccacagctgtaaaacagggatacgggataataatacctagttattgtgaggtttatatgagataatgtttatgaaacatctagcaaaaagtaagcacacaatgtagctgttaattacatgtgactgatgctggaaggccttaacccaggagcagaaaagctttgcagaaagcttttaccataagctgcaactgtatgatgtgcatgaggtggacttaatgctgggctctaacttgggctgccactggtttcagaaaggttcctaaaaatagcatgaagctgtggcacaagattttttttttcctatcaatccctaactaggattcatggagatatcagaaatctttttggaccagatcttagctatgctacatttcaaagttaaatcttaagtataggagctgcgctatattaaaaaggaaacaaaaaaatttatgatatcccatcatctttgcctctcaaagccccttccttttagcacccagaatgccacccaattaaagggatgtctagattcttgtgtaatgagtaaaaagcctgccttgctcacctctgaaaccccagccaagtggaatttactgggaactggtcacacttgtcagctgcatagtgacctttaactctctctgcacctagctcatcactgttcagaagaaacagagacctagggaggcccgaccttccttatgagtcttgcttagggtactagcttctgaaaggacaagacagtccccactctggggatgatgtttcttgctaaacagaggtttacctggttgaacaccagaaaaagtagatgtttgcatttgggtgcttctctgtatgaaggacaggtattctctgttcatgagagtcacctcagctccacgaaaaccttgttcaacaaaggcacacagagctcgggccactggaggaagcagcaagcaccctgatgtcatgcttactccagggcaaaactctgtggagggattggtaagcaggggtccctgtgctatttaaattatctccacctgctacttccctttttttttttttttttcccatttgctaagcccatgttttgccctgctgaggagcagctagagatttatcattcattacatgatacttccttctggccctcacatatttaacctccttcaacctcagatcctgcatcaaggaagaattcacagctctgtgccacagaattaatttcttctggcttttccccctttctttttaaccattcatccagctctacagagcacaaggccgactacagaattagtttaaaagaaaaaaaaaaaattaagctactttccaagcaggtaaaatttgcttttacatattttctatctctttctctgcttcaggcccttgtaaacatctaaggctgaagccctctccctggccaggggttcttatttactttttcacagtctggtagctttcaagtttaactgtcttttttggggggctaagtggatgagagaggtaagagttcccacctattagaagggcagagacaaagaatcccacactcctgaaatttcattaaaaaactgataccagggcaactgatggtagacagctgtgtggggggttaaatctatggtttgggaaactgtagtaaaaggacagcgaataataatctaatttaagcatagttaccatcaactatgggccaggcgctgcactggtttttaaaaaatatattatcttttaaaatctgaagtctaattgtggttgtcccactgcctgtgggagattagttcgtctccccccatgcatcaaaatctgtgtatactcaagtcccgtagtcggccctgcagaacctgagggtacagaaagtcaaccttccttataagtaggttttgcatcctgcaaatactgcattttcaatccacgtttggctgaagaaaatccacatataagtggaccagcacagttcacacctgtggctgttcaagggtcaactaagtatgactgctcctatttcactgatgagaaaatgaaggccttgcatgcccagtggccaagaagcagacctgggactcaaacccaatctgattccacagcccaggcttccacctgctggcctgtaatctacagaagtgcaggacgactatctcccatcacaataaaacccccagaacctctcagagtcctactgctccctgccactcaccaagtggcttaagaagggggaatttaggttctgagtccactgctgtcagagacaaagaaaacaaagcgggggggcggggagcagaggtagagctggaagacaatgttcacactgttccttctggagaggcccattgccttaaaggaagggtgcacccaaaatcagccttgatttatttaactgccacattttagactaactcactgctgctgaaaaggagtgggaaaagtaaaactggcaaagtgacatgctcttgtagctaaattggccagagaggccattgtctggcccaaagaatcacataactgggagctgaaacatctgggttccagtcccaattctctgtgggagtccaggcaaatcacttcccttctttgaatccccatgtcttcattgctaaacatgggtgttggatgggataaaacttaaggaatcattctgctctaacatttttggcctctagggtgcaaaataaatgacaaatagctagttgacaagtatggatactgcacaaccaatccaacactttagcccagtgtctgggagccaagggaagcatgagaaacctgtaatggtgtccatatccacaaacatgctttgattagtaggaagctaatacacatcttttcaacatgatgtacaacatagatgaagactccaaatggcagacaggcaggacaagccctcattttcaagggttgaaaatcactcctgccctgagacagaaggcatgggttaaatatttcctgaatccctatctttgctagctccatcccatctcctcttcgaggccaggccaccaatagctctcactgggtcatgtctacaaacactgttacctttcatttatgctttccctctccaatccattctccacactgcagtcacaatggtccttctaaaaagcaaatcagagcatgccaatcctttgcttcaaaccctaaaggctttccatgcctttccaagataagccccccatctttccaggctcattaccgttcttgttccccattatcctttagctataacatacatcttttacttcctcaaaagtggcaggttctctcccacctctatccctctgatctcagttgaggtgccacttcctctggacatccttctttgactcgggagacaaggctgggtgccctgccatggtctcccagaacctctgcactaactccatcacagcactgaccacactccactgtaaactcctgtttattcatatgtctgcccgaccagattacaggtattagggcggcagaaaacacatctgtcttgtagtcaattgcatcctagcagctagcaaagtgcttggaacatagcatgtactttcgaaacacaaataaacaaacatccttattaacgaaatgaatggcctcttacctaagaggactgtggaaagtgggtaaagaagacaagctaaatggggaggtgaaaaaagggaaggaataagctggatgcccgtgtgtccgtgcctctgcaggtctgcccagaggctaggatgagtacacaagcggataacagtggcaacgacagaggctgtgaagcgttcaagggcaagctgtgccctgtgctttgtgcagatgtgcccactctacattctgtggagcccagggaaactgaaaaaaacagttacttatgtttctaatgtttggagatgttggcaacagaacactgttttaatgctacacgtatgcacagggaatacaaaaggtaaaaaagtaggtcacaaataaactcagcaatactagtaactggacatcactaacaaattgtgtctactgccgtcttggttgtatgcccaacactatatggcacagtacctttctcatcctcatcccctttttaaaggatgcatctccatgcaggctgtcagctaggaaacgatgatatacatgtttagttgctatactattgagatggattctgctatcattctccataaattgtgacaagatagagagactaagtgttgcaattcaacagtaaggaaaaatgcaaaataatttagaatttaaagaaacagagagatcaagaagacaaaaatcagcagaaactttccagcacagagttaagtgagttcaaaatccaaaggaataacaacaaaggcaattcagaggagaaaaataaattcctataaaaatatattttaaaacattacatttcaagatcagaaataatgtgcttcagagaaacaatgaaaaacatcaagataaaatagtataaatagatgaggtggctattttcttcatacaaatcttcgtggtggactggaaaaccactaagggatggagggactgtgaaatgagccacatatgcaggatatggaagttaattaaacaaggagtcaggcagtttcttgaaaagcaatttagccaaaacaaaagacgaaaaacaaacaagctattaacacatacagtttcttggccaaacaagaagtaaaagaaaaatacacacacacacacacacacacacacacacacacacacacagagagagagagagagagagagagagagagagagcgagcgagcgagcagtcaatacaaaaggcttctaaggtcccagaatttcacagtgatcaggccatgagaatggggaacaacagataaggctttcaaccttaagtgtggtaatttaaaatcaaaccaaacaagacatctaaatgaattcactctgtcacatgtttcttcttttaataagaggataatatttttacactactgctgttttttaattttttcaaggtaaaaactctctgccttgtgtagctggtataaccatattgtggaagttctcagttctagcagcacactggaatcacctggcagctttaaaacactgctgcctagacccctcccccagagtttctgatttaattgtctaggatgtggcctagatttttaagagtttctagcatgattctaacacacagccaaggtagagaaccacagtcacatcatttcttaggctaatagttctcaacagataatgaagttgaaagaacctgaactggattgggagatcagaaagctgcacattaatttctaaaaataaaacatctttttctgctttattacctccctcctttctaaacaactggattcttgaaagcccagcactgggctggcttcctttggccaagaaagaaggaaggagacatcatccaaatctttatctgctgctctctggaccaagtttcagcaaaagcacatctgtcacaatgatgattaatctctaagaaggggggctccctgcacttaaggaccagcagaggccctccctcattgccatcctatgtctggaaggcacatattgctatcgctaaatcaaaacctaggctgacaaagccataatggggcttcttggtggagaaattcattccctatgatgcatttaaggagatgatgccaaaaagtccattagttcagatggtgtatggggacccagcataagcagaggacatgagaaatagtactttatattttatccagactatcctaaagataagtggctggcataacccattaggctaccttcccccacctcttaactattaaatgacatgttgtaccaatgcctgctctttgagaaaacctcctgctttctttatgtacactgaacatggcagcctcctttattccacccacaaacaaaacagtgtgttctgagaaacgatggaaatcctgaggtgactctaatccacatacactgctgctccttctgttacctagtagcattttaatgtaaattgtgttctagaatgctctaaaggcatggacttctgtagcatgttgtgttctctgccttgtgcttggcatatagctgcactccatatatagtggttgaatgaatgaaaaaagtctgcctatctgaataatcatggcagtggtgtttttttcttgctctatttctttatatattgattaaatataaatcacatgttcactacccaaaaaaccccaattgtccttaaactctagcaaccagaaataactaatgtaaccagaaatatatcctacaatatttccttataggtacataaaatgggatcatcctttctgtgttgttttatatcatgctgttttccagttaatacaacacgactgtctttccatgtcaacagatatgcatatgcattgttgttgagagtatctattcgtagatttcattaatgtttaccactaaggatgtctcattctttctgcaattctaagtaaagcttgcatacaggataatcttcaaagaagtagaatgactgggtcagagttgtaatgagaagactgtaacctccacgatggcaggggtgtccccaaaatctagagcccagagcctgctacttggtaagtactcaactactaatattctctgtgctttaagagttagcattccaaaaggagagaaagacaggtaaatagataatctgcctacagctatagtctaacattaggtataatatctgcatgcatgcaaagactcatacattctctcatttgcacaaatatttgaaaaaccatgtacaacttttcaccttaatcagtaaaaaggcattgattgtccagtcttttataagaaaattcttgaaagattaaataaacacaatggaaaccagccagggctgctaaaagaataaatattttagaagggggtgagtatgtctatggtgtgtactggaggttaaggggctcgttttttcacagacacagaaaatgtggcactgtgaacagctatctcaaaggcagaaagagatgagagagaaatgctaaaaatgaagaggcaaaactccaaacaaataaaaattctggcttttaaaccaacacggccagctgttcttcatggcaaacaggaagaacagatagagagggcaggcctctaatgggcactgaaaagaacaaccaagttctttatccagatcagctgccatctgctgggagcactagattaatggccatagaaagaaggccaaaggtggcagccaagccctggagagacaccagctgagggggaggggcacgtggggacatctcaagtttcattagcttcattaaacaaacggttctctggagaaaagaggcttttggttctggggctaggaggagctgaatcaccagaggacatgtaccaatgtacctttatcttctggtgcaatcacttctaaggggagaaaactatgaagaaataagaactccagaagacaatcagatggaaagttcttcttcctgtggaaagatcgtgtcttctccttctttgctgtttctacaacattgtaagacctggtatgtactcaagagaactgaaataaaaacaattacaagaaatttaagtcaccacgggaaaaaaaagagtactctggtttttgtttggttaaaaaccaaagaatccatacctaaggcagaagggaaaaccacaaacacctggaggtgcctgtgtatgctgagcctggagacagaggctccaggtctgaatcctggctttggccatttactagcagaatgacaggaagcatgctaacatcttagactgtttcttcagctacaaaatggaatttgtattacaccttgctcctggggttgctgtaaggctgagattctccaactattctagcacagcaaaactataagtgtatgcctaaaatactttctttatactatttaagatatatttagactagggctttctcaacctcaagcattactgatattctgaactggatgactctttgttgcgggggtctcctgtgtactgcagggtgtttagtagcatctttgccctctgtcaactaattgccagtatcccctctaccacttagttggtgaccaaaaaatgtttccagagaagtaatcaagatgtccttcattacctgaaaggataaacaaactgtagtgcttctggacaatggaatattatttttatattattatataaaaagaaatgacctatcaagctgggaaaagacatggaggaaccttaaatgcgtactgctaagtgaaaaaagtcaatctgaaaaggctacatactttactttatgactctgactatatgacattctgaaaaaggcaaaactatgtagacagcaaaaagatcagtggttgccaggggtttaggatgagggaaggagagacgactaggtggaccacaggagatttttagtgctgctaaaactactctgatacagtaacagaggatacatatcatcgcacatttgtcaaatccctagaatgtacaacatagagtgaactacactatgaacttacattagtgtggcacccttgtcatggttaatgaatcagtatcaatacattattattaactaatgtaagatgttattacctaattattaactaatggaagatgttaacaatagggaaaaccacagtggcaatggtagcaaaatgagacggtacataagaactctggacttttggctcgatttttctgtaaatttaaaactgctctttaaaaaaaaactctacaaattgaatcattccatctccactgagaaacatggattaatggagtagtcttttttgcctttttggcttaaaaaaagaaacggctcctagatcttatgttagaactgattatatattatttttttatactgcccggaaaagaacgccttgtatattttatgtttctgttccagttctaagtagatatgaacacctaatatccaaagagtcatctttgaaagtctgacacattcaccctaaaaaaaggaacatcatttcccccctcaattgttctctaagtcttctattgtaatactaatatattgaaagaataaagataaaaacagttttaacctatgaacctggtcaagtctagcagaggctcaaagccaaccttcacgcatctgcactccctgaaacacgctgtccaatttacgtttacacaaccaatagtcttctatgcatctgcccaccccagtgacagtggttgtatgtgacaatctcatgtttaatttcaaccttgttcaaatgtgtgatgttttcaattttacacaggaagtacatcaccaactaaatgatgatctcacctaaactacttacttcaacagcctcttaactgggcaccctctttccacctcatactctcacaatctattttccagagcagccagagggatccgttttaagtgtaaatatggtaattcagtgctgcttgtctttctcaaaattacaaaacaaaacaaacaaatggaaaacccaaaacaacaaaactccaaagactccctattatttagagtaaaagccaaagtcttgacagcagtcagcaggccatgcataatctggctcctgccacctttccaacctcttcttcctcacacgctctacaccttggccacatgacctccttttgttgtttcgtgaatgtgtcaggcatgaacctacctgaggaccttcgtgctgtcggacccccacagctaaactccatcacaacttaagtttgctcatgaagtctcccctcctgctaccacactgcccaacaatcattctctcttgtatctcctctctttttgtcttcatagcacctactgacacctaacatactgtttatttcttgactgcctgtccccactaaaaaacaaattcaatgcacatacttcttagtctctttctcattgttctatccatagtgcttagacaattcctgccacattgtaggtactcaattaatgaaagattcgttcactgtttttggaacggactcttgctctgttgcccaggctggagtccagtggtgcgatctcggctcaccgcaagcttcagctcaccacaacctccgcctcccgggttcaagcgattctcttgcctcagcctcctaagtagctgggattacaggcgcccaccaccatgtctggctaatttttgtatttttagtagagggggtgtttcaccatgttggccaggctggtcaggttctggtcagaactcctgatctcaggtgatcctcctccctcggcctcccaaagtgctgagattacaggcatgagctaccactcccagcctattcattcatttttatatccatcacttaaccatctccattttataaatcgagaaaactaaagaccagatcagttacactagccttaagtcagaaatagaaagtgatctgacccttaagcaactccaaaactggaccactcaaatggactttactaccagctgtttcactggcaccccctcaaggctctaagagaggtatcttaaggattagtgccaagaacttcacatcactatttaagctcttaggttagatctccttactcctattcatcacttcttcccccagacaatattcactcaatgtcccttacttacagttccaacatcatcagggcaagtcatgacttgttatgattaactaggattctgggatcataaagtcctcagtccaaatttattcagccaccaactatgagaccttcagcaagaaggttaactagttaagccataaatttttcatataaagaatggtgatagtaatactaacctcacgggtttcttagagagattcagggaaaattatgtatagaaacaccttgatactgcaggcaatctagcagagtaggcacttagaaggtgttacctttcactacaagtattatcatttagcaagtcattcactcactcaaatatttcctgacttctatttagcaagtcactgtaaatgcacataagtgacttctttccagtcacttggattaatagctcctttttaaatgtccctctccccacactgacaacccctttagtctttgataaatgtttttttaaagccacaaaatcaattcaaaggcaaagagaataccttatccattgacattaacataaagcccccaaggatccacatgatcaattggtcaaaggtctaagtagagctggttctttgtttcctctcaaactttttactggagagactaagggacagatgttaataaccttagggcacaagcggaacaaactcagctctctgcataaggttaaattagcagatgtaaggatgaaaggagctaggaagccatttcattcatatatttagggtaaactttaagtaaataccaatggaccacataaattcttcagctatactcacaatgctcggaccatgtaacttaacatgtatttgtattccccatctctctgtcttatctctatggtgcttttctcctccaattaaaaatttaagtatttcaggccagagacctcagagcctaacaaactagaaacatgtttccttcactccacccaggtctgagtgtctgtactagctccctcagtatggagcacttgtgcctggccaactcttctcattctggctccttctgacatctcaggatgcagctcaaatataatttccttaaagagatacctctgggcaatccttactaagttttttccaccctcgctctatcaagtcaccctatttgtgttctccataaaagttatcagtacctgaacttaattttacatttttttgctttatctgtctccctctacaatgtaccctctatgaagaagggaattctgtctgtgctttttccattgctgtaatccccaacacccagaacaattactataaaacagtaagtgctccatttgatatttcttgaataagtgaatataattaagtattcaggaaataatatttaactataagtcacagatttttatctgatcctgtggcaaaaaataaagagggactcaaaatgggaactgttaatctataatatgtacaacctatggcaaggggcccacagatttaggtctaagccacgccaagtagactagggatggttgttcctcctccagtgattcaaatgggtctagcaatccagagcaaagtggtaaaattttacctgccacctgcctctagtttttctcttacttttttctccccaacacccaacaggtaaccacctttctatgagagaaagatacacatcatctgcatagtgctggacaatttaaatgtttcccttccacctctcaagtgatcatctaacagcttggtgaggtaggagtaacagcgataagcacctccatttcccaattcccacgctctaatttgccaatgagaaaaccaaaagcctgcggaaagtcaaaacactagtccaaagtcacaaaggagtaaccggtgatggcggagcttgaaatcaggaatttctggctccaaatttcttactccttctactatggttaagttgcctttcctaatatataaaatggatttttaactttagtgttaaaatacacttgagagaaataatgtttgcacagcctcagcaagcagcttccttcctcaaaagttgtctccatttcctgacatagaattaatttaggaaatgcttacattttaaaacccatagtcaatttgcttctagcaaaacattcttgaatttataatgttatcacaagctccttcaattattatagaaatattttaaatgcacataactatccatcttagtgataaattttataagttatgacttcaaaagtctactccaaacttagattctataagctaagattttcacagttgtccaattcaaaatatacttgagtgttttctcccactggattataaaaataagattctcaactccaaactcgaaaataacccaaccccatgttatgatcaaaataagaaacctgaatacaggcagacaggggtgaactactcaatatataaaatttaaatcaaacagactaaaatcaagttgtacattttttattctgtatgtatgtctgtatacaaaaataattcagtcctttagaataagatacggatgttctttttaaaataattgtagtatcttaagcaaaaattgagtaagtgtaactaagatcttttgataaaacaatagtttatagtcaaattaacattagcatcaaggaagaaagcaattaacattagcatcaggaagggaatcccaaacatggagaatccggaaatcatttttaaagttttttcaacaatagatttaatttttcaacatctatatttttgacagacataaaacataatttcaactccctcagtacatatcaactaataagaaatgggcctgtagaatgatgatgaagaggcaaggcatggtggcttacacctgtaatcccaccactttgggaggccgaggcaggtgggtcatttgaggtcatgagttcaagaccagcctggccaacatggtaaaacctggtctctactaaaaatacaaaaattagctgggcacggtggtgtgcgcctcaaaaaaaagaatgacaatgaagagtctacaactatcacgggcagttgagggaaagggagccagttggtattttaaatttgcctgatgctccacaccacaaatgacttacacgcataataaaagaggtgagagttgaccagggtagccttagattttcagtacttcaccaaacatgtcctgaagcacctatccatcaaagagtgggctaggcagggggattatccatttgataatatctggagtgcctactattttaaaaagcacaatgcttgctttggggcatagtccctttttacgaaattcagtcttgggagtcaaatggtggacacagagagacaggtgagcaattaatttcaacagaatgaataagtactaagacagaggtacacaatttcctataaaacaacagaggagaaaaactaactcatcctgactaacagagaggtgatgggtggcaaggtatcagagaagactttgggtgctatgacacttagactaagtcctcaacaatgggcagaatcaatgagatgaacaagtagatagctgggctgacatgaatggacacatcataagatgaggcacggtatgcaactgctgctgcagatgaggcaagataagcagtgaggcaagacagaggcgtgaccaggacggccttgtgggctgcaccaccacatgcggctctcaccacagaagcaaagggcagccaccgaggagtgctatgcagagggtagcacaaagaagacagttctgatattgagatgcatttggaatttcctgatatttcattcatggctaggggaaaatgagaaaactcaatgcaaacagagattggctctaaaggaagaacagattttggttcctctaaaactggacttttaatcacaagctgtactgccaggtgaactcccaaccatgtccacaaaaatcaaagactgaccaagcaaatttcctaggtttagttgaaaatctgtcaaaatccagaactcagcatgagtctttagacatatttttatgatgttaacactatggtaatttcagtaatagcagacaataaaaaaacagaggctcttttctaaatcgtaatatcccaatcgtccagtttctatagtagaaattcccagttctaccatacattaaccataccgacctggcatacttgcctatgatttctttgtctcagcttcctcatctacaaaatggggctaatacagttttttttgggggggggaggggggtgaggggaggggaggagataaagatagagggattaaatggtagaacaaatatgaaagagctttataattctctacaaataatagaaataaccattgttatgggctcagacaacagaattatgaagtagaaaattatgaggaagaagtagcttcaatgcattaattaaaattaaaaggactgttttaactaagtgataagttagccaagaccacttatttttaacagcataaaaccacctatcaacctctccttgaccccaggagtcatcaagcaaatactcggaaagataggggtgaagagtctaaacttcatggtgatagatgtgtcatgaagtgaattaaaccacaaaggcaattaagtcataaaagcaacagcagtgatagtaactagacagaaggctcagaggatcatccctgaaaagatttcattaactaaaccacaaagtcctgctgaaaaacatatcagcaatctagttaaaaatgggtcacactatttatagagtcaatcaccaaatcacatattctctagttaaaaaaaaaaaaagtctgaaaactttattgagcaagcatgttaaacagtactacttcatgcccaccaaaggaaatagtctttaaattctgcccaaacttgacagaaaattttctgaatgggctcaatgcaggaacaattccatttccctatatatttgagctttactataaataaacaagcttaacatgatgccaacataatgtttaagttacactttgagaacccactgtacaagtttgggactcaagaccaacctgggccagtatctactaaggcggcagtgtttctctgatgaagctcctctttagctctattgtgaaggaggctttatttgttaggctcagcaagggctcccacagtggggaggacagccattctatgagaacgcagtccagggcaggttgtcagaaatgtgtgcaaaaggaacaaattgcaggcctggaaaatgaagcacatttgctgttctgactacaagtgacaagtgcaatgcaccaaaatgccatctgtagttatctgagtggtggaatcatgggtcattttaaaattctcttctctgtattttgctcaattttcaagttttccccaatggccatattttataaaactaagaaaaggtatccaaataggtggtaattttgaaaagtagagaaatttacgtctaaaataacaatagcctatgctgtctcatagagacaatctctactggcattgtattctatcttttcctagtcttttttcagtgcacatgcatctttttcactcgttaagccagtacttaaaaagggcaaaatagggtccagtgtggtggctcacgcctgtaatcccagcactttgggaggccaaggcgggaggatcacctgaggttggaagttcgagacaagcctgaccagcatggagaaaccctgtctctactaaaaatacaaaattagctgggcatggtggcacatgcctgtaatcccagctactcgggaggctgaggcaagagaatcgcttgaacccgggaggcggaggttgcagtgaaccgagatcgcgccactgcactccagcctgggcaacaagagcgaaactccgtctcaaaaaaaaaaaaaaggcaaaataagtgatataggttacttataattatagaaagcaaagattttaggctaaataataatagtatgtcaagctagatggttaaaaatctacttttaagtaaacaaaaacaactcaaaaaaaaatagtaatttgaatacgatccataatgatttattaattgtactccttctaaatgagaagatccgaattcagcctagaacatgtaggtgcaaatatactcttgttcacctcattaaattctaaatgaacaccaaccactgtaaatatgtggatcacttgagcccaggagttcaaaaccagcctggataacatagcaagacccagtctctccaaaaaaaatacaaaaattagctgggtgtggtggtgtgctcctgtagtctcatctatcaagaaactgaggtgggagaatcacttgagcctgggaggtcgacgctgtagtgagctgtgatcacgccactgccctccagcctgggtgacagagtaggaccctgtctttaaaaaaaaaaaaaaaaagtaccatgcctaaaagagctggctaccatccaccatccctgcagctgaacccctggccttgagcactgatggcacctttgaaagggagcttgaacacaaaccagacgagagctaaatctaacacacttaagcaaaatacaatatcactaaaaggaggggaaaaaaaacccattaggaattctggttttaaaaaaaatactgcaacccgtagcaactccagggggccttctctcccttttgatagtgaatgtcctctgcattagggacatttccaggcccaaggcatacacaggcattatctcactgaaccaaccattacaggtgggtactattataatttctatttataggtaaggaaaacaaggctaaaggaaattaaatcaagatagcacaacttttatgttccaatgtggggatctgaactgatctttctgattctaaagcccatgttcaaccactgtagtaacaaagcctagcacagaaattttcccccctagaaatagttgcttagcttgttctaccatttagtcataccctagcattctggatttggttttgccaatgtgattttcaaccaaacaagatgagggaataagcacgtgagaaagacatcaaatgaaggccaaaaggtgtcccctcatctacaactgatccaatgacagcagagtgacagctcattaaattaaaaaatgacttggcaaatgaaagcaatcatagcatgcacatacctgttcatgaaagaacacaagtgaactgttgggtttttaatactttaggttttcatggaagaatcataagtacattttcacataaccaagtgcttatgttctcctagtttagtttctgagaacaaatggaaggaggtggtggatgggctgaacaatggggcaaatgaaatatactgataagcaaaaatccctaaagcctgcagataatttctaagcaattctggtgggtccctaaaataaaacatatcctctgccttcaacaaaataaaataacataaccgtttaaaaaaaaaaaaaacttttaaaaggtccacttcttttcctcatctttgcagctctcactctcaatgagatcacgtataaattgagtcctccttccaaatctcttaccttagaaaggaaactgctattttgctgtgcaataataggtcagagaagaaaactgttttaaataatgccttcatgcaaatttactgtagggttatctgccgagtaacagactacccttgtgggattctcaaattacagttatattgcccaactaggggagctgcagtttgaaaatgagaaacttcttttggcagtggaacacataatcaacgtcctcacagaaaagcagacgtttcagctacagaaaataaaaaataaaattaaattaacttcactgcctaaaaccatcagccccaggatattcaaaaatcttatgaatttttatctcagacatgatccacattctgcatgaactaaaaaactcatgactttatactatcagttctgatattttaacagtctttactgggggaaagggaatgaatcccccagtgtaaagcagcagcctgtctgcagtcaatgccactgcactcgacaccacgtcccatgctcttctcctctccccacttcagctcagccctgcagactgctggcttccctcacacacaatttgctgcagtccacccctaggctggcaagcagcccaccaatcactcagtgtgacaggaagtcaatctgaatatagaagtactgcatgtaaatggacattataaatgaaagtctagaatgcgtcaccttcaatttggtcagaaaaggccatttttaagaaaacaatcatgcaaggctctcacttggggtcaaaaaggtaagcttcctccccccacttacaccccacatattaattctactggaggggcaacaactttcatactgtgacatccctgactttattttttaaccttcataccactttttatgatgctctcaaaacatattgaaatgatgaggaggaggaagaaaagggtggaacatttgttaagcaccagctgtattgctaggcatggcactgagctccttttatacagcagtttatttaatcttgaaacattacaaagtgggtatcatcatgcccatgttacagatgagagggaactgaggtttgcagaggtaacaaattgtccaaaaactacctgtttctaccccaatttcacaatgaggagttgaaggcccagaaatactaagtgctgtatcaaggataacagagttaatacccacactaggaaacacagattgccaggcctgttcagtaccaatgcctgggcaggctttccaaaccacagcatgctgcgcttcccagtggcacctgcaaggtggggacctgcaaaaacgtgcttcacagggtcaggatggaactgctgtggcatctacatgctctaactggtgcaaacgaaagggagctaagccacagatactaaacattaaacaatccaagactggtttagatgtggtcgggatgtgcagacaactacttcagccacagcagactgaccactttaattagatcttgttcaggccaataattaacattcatttgcttactctgaacttctgaactttaagagagagagagaaaaagtgggttccaaccccaggtcttccacaagttagctgggtgacctttctgaatttcggttaccgatttgtaaataagtaacaactactgtctgctcccgtcacaattttactatgacaattagtggagaaaatgtgacaagagcctctattaaaccacaaaacactacagcaacagaaataataatacatatcaaaaagtaaaaacaagcaaaaaatactacatatcaattgggcagggagagttcacaaggaaaatagtaggcagtcccaaatcatggtggtggcatgggaggggatcattctaggatttacaaaaagaagaagaaacaaaaccaaaaaaagtctatgaatactccacaaactggtacattctttgtatataaccaagagagatcatataacataatgatcatgccctgtcagggatgagagttgagatccagaaagagaaaaatgaaactgggtcccaggaaataagagctaggaacagggggtctaaggcaggggtaagtctcaaaaccaggactatccactaataatgttcagaattgcaacaaataggaagaaaaaccctacacattgagcagagcataaggaagaggctcctcttcctttctctaaggagaagaggcgagtctgaattaggctgagccaagaaatagaccacttgttgcttcccagctgtgctcccatgaggtgtctggagtgcctccattagcagggtcccctgcttcccaagttcaatgacagatatgccccctagcaatatctggtctacccagctgcaattttaaatggaatgactattacagtgtatggcgtacagaggaaattggaaaatgcaaaagaaaaaaagcaacactgagcacccaaaccaattcacaacacttctgcccatccatcattcccattctccctaacttccaagtgctagcttccttttttcttggtaatacagctactagcctaggcctagatataaatcccacttatctactccctctacctggtttcatggctcatcttcccactggcattggccactcccttcgcctgtgcccttcgggtcccttctctgcagaggaccaactcatcatctattccatggctaggagagaaaagcacttccgtcttttcagcttaaaaggtattccctttcctcaagacctattctcaaagaatgctgtcccttttctactgtctgttcccatccacaagttcacctgtgaccactattatgccatcttcataccagtctcctcttctgagggctatgccaaccatctttctctactgagctccaggacactaatacttcaataacttttccatctaatcacaattctttctactgcaacatcactctcagcagttttggtatccatattggtaaacatcaacttctccacctcctcacttcactaagctttatctcttttctactccaagtattcctgatgtggccttgtgacagacactgctgatgtgctgccccaacatccattctccccatctccttagtactagaatcctggtttttaccagaatattttgaaaatacaagtttccatttcctagcctctcttacagtcaaatgtggtcaataaatactagtgttatttatatgggttctggaaaagaagtggctcagctgggaaagcccaattttgcccttccattttagattctccatctcagaaatgacagctggagctctggcagcaatcttaagctgagaggtgaccttgaggatggaagtcatgtgctgaggaaggtgagatcaaaaggaaggaggcctgaatcccaaaggacgccacaaacctggcattccaggcctatgtctaagttccttttagaggagagagaaataaactatcgcatttaagcttctgtttatttgggattttccccctgtaatatgcagctcaatgtaaataattaatactggccaaagatcaactaatggcaaataacaaaatgcggtgcaggctctccaacacgacaactcattaagaagagtctaaagtgacttgaaggccaatgtttcttaaccttatgtcagtacaggctatgctgttgaatgttccaggccctactatcatttggtacattatacaccttgagactcattcctattttgcttttagtttcacatcatgctttttttttttttttaatctctacagctgtctataacaaaactttttaggaaagtaccacaaatatgttaaacagaagaagcaaatctcaaataatgtgcaaaagctgtgagtttcttcttacataaaactggtacctaagcaagtgagggttcattttatttttcactcaccaatccccatatcattatacagtaacaccatacagccaaaacggccatgatattcctcccttctcagccaaaattgggcaagagagaatgacccttgtaggggaaaagaaacctctacgataaactgaaatgccaccatcagggtttgttgaaactgtaggaacagggtctacgactcacttagctgctaatgagtttctatgattccagatggagtagttcaaagtaagaagtgaaggggctggacctgtctgtgaatcagaatgagcccacgtcctccaggaaggttttttatagcctcctctcccaaatggaaaagccaaatccatcactgatgcttccatcagaacctgtagaggtactatcataacaccttccacacagtttagtgcacttaacctggaaaccagttacctccattgtgagctttgaggcctggggctctgttgctacgcgtttgtttcactagtgctaagagtggaatgtagcagatgttcagcacatgattgctgagtaaaagccatcctttgtggctgaagtgatgaacatggcatggcaggccctttcctcaaacaactaatgagctgagacctgatacagcagcaagaaggaccctataatcctgaggaggagggagtggagaggagagctgaggaagggctggtgaagaaatggttgctgcaccattagtcacttttaccaaaatagctaaaacaaggaacaggaaactattagcaaatggacgtgcagaaagcatccactgatagagagtttttatgacaagacaaaaaggaatagcacttgtttgatggaatccatggaccagatgttgttttttatttttattctttcctgagagagggtctcactgtaacatagtgatgcagtcacagctcattgtagccttgaccgcccaggctcaagtaatcctcccacctcagccccccaagtggctggggttacaggcacataccaccatacccagctcattttttattcttttgtagagacagggtttcactatgttgcccaggctggtttcaaattcctggcttcaagtgatcctcctgccttggcctcccaaagtgttgggattacaggcattagccaccatacccagcccagtgtttttatgatgaggtgcattagctgtgccatggagttagacagagctacaaggaggagaactactattggcaagcactactatgtgccagataccataccagacattttcacgaacatctcctttcattttcatagcaacacaatgagtcggcaggtgaaacagcctagctaagggcaaatgacacagcgaattaaaacatttactgttcactctgccagctctctgcatttttaacaggccatcctggttaatccccctcatagccagtgaagtggtattatcacctccttttacagttaggtccctttcccaaggccttaaaactactacgtgatagagttggggttcagtccatgttcatctaacttcaaatatagactagacacttaaaaaagcgtttcccctcatctcagaaataagacattgtcagtggaaatgtcaaatggagtggccaatggaaaaaaagatcagcaggacaaagcaatggggccttcagctgatggtctcatcactgcaacactgccctactacaggagaagtgggaagggaaaaaacccattagaagcagaattaaaagctaggagtctgctttatctgagtagaaattataagaaaattaaaacaatttattagaacttaaaagcagtcactcctataatcagcaccactgtcagtcttctgaagcgtttttacaattttcacttcctctgtagcaattactgtggttatttggagaagaaattgcaagggagctagttgagcaccttggtgaagaacactaagatggcaaggaagcttctgcagctagaaatagaatggcaccctcatttatgttactgttgcattggatcacatagccagaaccagcccccagctgctactaattttaagagagccatttctgttctttaaaaaataaaataaaataaaaaaaggaataaaagtatgttgagaaaaattcctggcacttccctgacagactgtcgtattagtgaatgaagactaaaaaccaaatggggagaaagcagccagttcaaggggtggtggggattgctccaggccctgaatgaggtagtgtggtacccttcttgcagggctatgggaacactgagtggcacagaacagagcaagtatttacaaatcctgtgaatggggagtcagagcctaccttatccgtgaagatgggacacactggcatccactggtggaagcattctgggaggaactgggcaatgttcaaaagccctagacccagcaactctacttactgagatcccttcctgggaatcatcaaaaagatgaacagagcaacgcacgtattaaaatagcggagggatggaaaaaccaacatcagtaacaggaatatgaataaagtaggtgaagcagtaagacaggtacacccacacaacagaatattatgtagtcatgaaaacagagggcaaaagtttttaatgacatgacaaaaaaactttctaggtgaaaaaggcagaaaatgcagctgcatatatgacattattttgtacactaactacttcatacaattatttacatgttctatataaagtcttcactattactatataatgcatagaaaagtacattttaacatattcctgtctagttaatgctattagtattcacaaaattagcacacaatcttctttgtacttttctgtattttccacatttttataatgagaaattacttacaatgttctttaaaaaataaaataaaaaagggaaattactttcataatcagaaaagtcactatattttaatgcaaaaccaaatttatcatgcctatcaaattcactgccaaaatggaatatcaatgagcatatatgtcatgtgcctccaggatttaagatcataagaaatacagagggccaggaacagtggctgtcgcctgtaatcccagcactttgggaggccgaggtgggaggattgcctgagctcacgggtttgagaccagcctgagcgacatgacaaaaccccatctctataaaaaatacaaaaattagctggtgtggtggtacttgtctgtagtcccagctacttggtaggctgaggtgagaggatggcttgagcccgggaggtggaggttgcagcgagcaccactacactccagcctaggtgacagagtcagatcttgtctaaaaaaaaaagaaaaagaatacatacatacatatgaatgaggcctgacacctagatttaaacactgagaagtctagggctgtatgaaggaggaagagttaaaaatgaaaattataaccaacctagatgtagctttccacacaaccaggaagaagtatcattcctctctagtatcacattaaaaaaaaatggagaaaattcagagcttttcatcctttctaacaggctactctgaaagtagaatttaccaatggaaaagagtaaaattatctatcccaaaccactgatcagatcagtagacatcaacaccattgccctagtttactttgccaaagagtgcaacatgcccagtcttcggttaaagacatcaggaacaataaaacaagtaaacaactaacgggctagccacctatctaacttcaaatagagacaaccagaaatttgagaaaacctttttatctcatcccaaatatataaatcaagaatgctggctgaggaaacctaaggatcctttcaattttgaaattttgtgattccaagacacaataagtttaatctttggcatattaagctatctttcctggaagagcagctaattaaatcttccaaaaggctgtcaatctcctgcccccaaaaaaacatggattatagtgaataagccccagtggctacagagacaggtgactgcaaagaagcaggcctggcatttacaacccactctatagcctcatttatggtactctgccacctctgcaagtacaactgatttcaaattcggctccatttgaccatgtgggcttacacatgagggtctggttcagcaccaaagattccaaagggcaagaagaagcaggcatgtgagggtcaatcagtgagttgggagttaaaatccctcctcagtcaataggaatgtgaactctgggacctcaatttctacatttacaaaaaaggagagagatgtacttactagatggaaatctccagcttttccacaaagtatcccttagaagtcagggggtgcatcctaaagcactcactactctaactacataaacctaataaagactctgttttatcaccaacacttgtgcatagtttgcactcctttgtatttccatggttgcttaaatataaaatgattactagtcacttaaattgtctaagttcttccactcctcccactcaaaatctctgagtaaaactaatatgccagaaagataccacgtttgtcttttaacatcagttatctcatcccaccatcacataaaacccagaggactacttcccctagtatgagattcaaggctcttaataatcatataattttctcttttaattttctatgataaaatgaaataagtgtgcaagtgtccagcattatacctggcatataacagatggtaaaaagatagatgctaaatctcaatctgacttctagcaaattaaacttgctttgcaaaatatgcattgcaaagtgctgagctgggaatgcaaatcataaatgtaatgaagatgctactgtgctgccacggttcttcatctctagagattttttgttaagaaaaatcagctggggagaagacaagagaagcagcaagtaaaacacacaaaagcaaaatttaaaagtcaataaaacaacttccaaaagaaggctatgtaggtatgcagtgaaaaattgcataagaaactgagagataaaaattcatactcaggtttagttagaagtctctctggagatgaattttatgccatctgtggttaaaaaaaaaaaaaaatgaaaatgctgtaactaaacatgattccttctcttagatgcaaataaattatggagttactgcaatctgctgaaatcaggtgtcttgagtccccgctgtctcctacagagaggtattacattgatcttatcccaaactgcctcattttaccttgtatttgaatcactggctgccaaatccttcaggctgcagatggcacatatatcttaagtaattaaatacagaactggggactaggaatcagataggggaagtaaacattactgaccttctaacaattcctttgtacttaatgatgaggactcagttcaatataatgctatctggattcagttcgattcaacaaatattcatttagtgcttattatggcaaatcctcatgctagggattgtgaagcatgtatagaacacagtccttacctaagtgagtttacaacctggtaggagagacaggatgcacatacgtataactaacaaagggcagaatgtggtaagagcaaagagagatatacaaagacctgcaatggagagcagtgggaaaagatcatttccaggccagggagacgcagaaggctttgaggagaaggaagtccatgtgtcggatggaactttctaacaaaacacccataggaccagttctatccaggctttgtgaagcactaggcatttgtggaatcaaactggatgagaaaaagatcagaataggcaatgcaatgaaattatcgtgcatctgctggagtgaagacagtgctccagtcattacagacaactactgcacagaaatggaaggaaactgttgttcctaaacaaaagcaactgctcctgttgatggcatggtagtattaagactccgttctggatcatcaccatgttcctggggaggacaagattcctaatgctgaggcaaatggactgctatgccgttctattcaagcctgaacattacggactggacactcatttagggatgtgagaaggagggacagaaactcttgatgtttttaaacactagtgtaaagaaacaagagggaacatactttctttagccacttttctgaaaagaacaaataagcctttaaaactgtaaccaacactatcagacaagggaaaggcagcattaaactgacctagctctatcagacaaatataagtaatttcaaggcacagatttccacctgccagtcccctgtcatgttggataagaaagtgaccacatttccagtgccatctgcagaagagctgaaagttctatctcatgtgaaaaaccgttttgactcctcctacctccctctactgtctgttccccctaattcccatttccagccagaatgcagcctccactcctctatggtcccatagtcctttgcagacatcacttgcaaagaatttatcatactatattaaaattaggcatactatgtatgtaaggcccataacacaatgctaggcactcagcagatctttgataaacaataagcatctcccctctagccttgagagacatccttgagggcatctttttatcctactgcctaatagattaccaggcattaaaaaaaaccacttatctgtaaataaatacccagaaacaaaaagatgcagatgcaggagcaattgtcctttcttgccccatggctcccagagctgccagggcttcctaacaatactactccctcagttatcaccctattcctccaggggctcaaaatgtattgggccacccctctccttccctgccagctctgttagaaaccaactaacccaaaccctctgagtcaatcatcaaatcagtagaagccaactttctgtaaagggcctgtgagtttctaatcaggaagatctggacggttctggcagggcctccctggtcctgccagaagcatcatgactcaaccccacttctctggctggttggctgttaacctttactgagcttccagaaatgttaggctcacttctcttttaacaaaatgaaatgagaaggtaaacatcatgggtaaggaaacagcaggtctgggagtatggccgaaactgtctaaggctgtcttggaagcaggtagggatgaaaaggttgaatatcattaaccaactggagagctgtatccacttgcaaagaagtaattttttaaaaggtttaaagatgatctaagtctgacccctttgctctacagaaaaggaaattaaggcacagtgaggcaaactgacttgggcaagtacttagaaaaaggacatcaaataaccaagaactgacaatacatgcaatggatgactcagatgtgttcaagggaattaattatatcctaatataactatgcaacaatttaggaagcataattcgtaaaatccattaaaatatgaggcctccaagtctatggatacaagaatagggctgggaaatttcagtggtacttacaacttcatctgttttacccagacagttaaggttcttgtaatgaacattcacatggcccacatcttaaccatgcactcattttttacagcacctcttttgaaaagcaaaagcacacccttgcatcctcagctagtggcacagtgcatgagcatctggtgcaagaagcaggagaggctctagacagtctgcctcgtaaccccgagctctgcaaaagccaagcaaaggtgactgagaacaaggaacccccaaaacccagaacactggctgctcaccggcagccctgcttgcaggcccttccagaggtggggtatgtcctaccctaacccaaacatgcctatacatttagggaccaaaattccactgacaaattctggggggcggaagagaatagcagcagtaataattaatgtgtgagctttcaacctttccttttctgaaaactcagatgagttcacatttaactctttcttggggtcaaatatggtagtttctttttaactaggaggagagctgaacaaattggagaaagaattcctttctttcaacgtattcaaaagcaaagagaattcctaaacatttgctcaggtaatacagatttctagcactgaggccaacttcaaacagtgcacagtgagaaaagaccagtgctacactatgcttgcctcgtgtgaatttggtaaccacaccacaagtatccttgttaagaaaaagacatctgtagcacttatcatattttgttcactctataagcaaagtaagagacatctgttcttaaactatgtgatctaaaagttcaaacacacctgtctgaatgactagttgaagatcagctattgtgctgaggaaggcgttttgggatatacaaagaggaaagcatagcctctatttacagtttagtgagacactaatacgtaaacaactagttaccatacatagaacagaatgaagtgttataactgtattaattaccacatgctgaaatgccaagtgactaagttagggcagggctaaatgcttttccagcactgtctctcctacttcttataaactgctgttgagatagatgtttttgttcttatattgtggatgacaaaaccaaggctccgagaagagaccacaaaacatatgattagtaacagtaatcacaagctttagggagtactaaatatgccagaaacggtggtaagttatgcaccttacatgaaattttctattgtcttcacaatgatgttttaagtactatcattatccccaattcacaaatgagaaaatggagaaaatttaagtaaactgccatggcggagctggcttaggaacctaggtctttttgactccacagcatgtgtccttaaccaccgtctatagttctaagtagtagagggttgctggaaatcagagaaggctttaaggaggaggtggcatgtgatatgcctcactctcaatgcagtgcctcactgccgacttcccagcgcatatccttactgctggagaccgacaaatgagagaagtcccagcatgctcacgtacaaaagaacaggagtttgcttttacaagtctactatcatgattacagtactcatgcaccgacttgcaaagcctgtgaattcacctgcctgcaatgtaagggccacactttcctacaacttttataaaacatcagtgctgcaataggatccccaatttaagcacaaacaagttgaaatgcctcaagcaatttccaccccaaataaaatacaggtttcaatacacaccacgaacagactggatgtgctggaatggtagttggtgcaacactgctgaactcctgttgcaacaactttcatttttatttcccctgaaaaaagcttaaacagctcgctccacgctagtcaaagaatattaacagggtgtccatccggaggccaacaaagagtagagaaaacaccagcaacaacaaataaatgtaaatgttcaagggttctacactttgaatgcattaagacagccagacagcaaatgagcagaaatggattcttctatgagaatcccaacatttaaaagcaaagcattaatttaatgcttctctccacattgtgtttcccagccctgagaactgaaaatgaccttatagaatatattcagagacaatcagtggcctatttcttcaggatccctttatttcgcaagtcatcttaatttagcctttcagattctggcacaccagacccactgtggttattccttcccctccccaggtcagtccacatcagagcaccatgatttagatatgaataactggatgaatgcccccaggaggcagcatctgagtagctaagggagctttcacagagttggcaggatgatcacatgccaagagcaagggaatttcaatttgcaaaggtgttggtagggcactctatctttctgagcagatgtaatgaataattctccctgcactccagttcctctaagagttgtccttggatttgagtgttgtggcactatgtgaacagctggtgatactatggccctgtctgtcttccaatggctccgctcaaataagtcactcatcctctcccaccaaactgttgtaccaaaattgttgggcaagctgctgctgttattccctgaacagctccaactggacctcagtgtagggtgttaccaaagcttggctccagtgttagggaccttgttatggtgtgatagcagctctaggagcctgaagctcttcaggaacatctcacagcacaggcatgtaagaccacaggtgaagattttatgttacttcttaattaagtaacatggaagaatcttcattaagactctcaggtgactctactgagacgggtaaagaagattaatataaatatttcctataatcatgaaaataaattaaatttccaacagcagtggaatagctgctaaagtaaggtatatccacataacagaatattgtgcagccattaaaaagcatggcttggaaatgtccagaataagcaaatccacagaaacagaaagtagcttagtaaaggatttggaggaaaatgaggagtgactctgacagttacaggacttccttttgcatgataaaaatgttctaaaattgactgtgcaactctgaatatagttaaaaaacactgcattgtatacttcaaatggatgaagtatgctacgtgaattaagcaccaataaagctattttttaaatgatggtttggtagactaatgacatggagaaatgctcaatataaaaggaaatggcagtttttaagacaggtgatttaacaggatcccacttttgcaaaagaaaaatatatatatacacactgagttttattatcttctacttctagcaccactactgcagctgtctaacatttactgagcacttgaactctggtggccagtgtcgtaagtattctacatgcatttctcgcctatcatcataacaattctgtgaaactggtactaaatgaggaaatgaccacgactggtggacaaaaaaaaaggcttgagcaagttcacataattagtatgtagtgccacaacagagtttcaaaaccagggccaagagaccaaagactatgctcttaaccactgtgacaaataatacagtagtcaatagtcttaaaagcagtgaaagtgcaggtgacaacctttatactacttttgttacaataaacctgtattaatttcaggatgagggaggaaaaataaagtaattaaattttgctgagtagaagtaagttctgatcatctgccccctgtggtaggccctccacacaaacacaacaccttggccacacaatactgcaccatattattttcatgagagatgtgggcagttttaagacaaaaagctgtaaaaacccaattaattagttatggctcagtagttcttttttttttttttttaagagacaaggtctcctctgtcacacaggttggagtgcactggagtacagtggtgtgatcatagctcactgcagccttgaactcctgggctcaagcaatcctcccacctcacagcctcccgagtagctaggagtacaggcacatgccaccatgctcaattaatttttatttttttattttttgtagagatggtggtctccctatgtcgctcaggttggtctcaaacttctggcctcaagcaagcctcctacctcagcctcccaaagtgttgggattacagacatgggtctgtatagatttttatggttgttaaaagtcagacctcttagactagcaggaaatatagggtaacacttcccttaatcaaatttctaatggtcagaatatgatatctgctggaatggttccactgaagcctttgttccccagaggcacttcattttactcctgaccagatggtgggtggctcttcctcacactggatttaacacttagggtatgagagccctccaactgttcaaaatccagccttaaccctcaaccactgctgctgcctcatctctgagtgacacagcggttcactaagccacttaactaaataagttttccagttctgtttccatcctggtctctgttgctcctctcaaaacatggcatccagttgtggaacagacattgggtgggaacctcccttgatgaagatacaacaaagcttcagctttggcttggctcttttcatttaagactgtgagaacttgcacagttgctacatcctaagtattgccaaagggtagagcaaagatccaggatcttggatttattcattccatttcccaagagctattaagaggatcttggaggtcagctggtccaaatctatagtcctacagacgtagaaagtggcatgggtgggtggctatacaactcgctcagagttccacaagtgatactgctctcctccagagctcctgtgcaaatatgttactggctcataataaatgtccaactaaacacttcaggtattctcaagctaaagttgagagtattttacattttaagaaaaaacaaagagctctgaaatagggactaaacagaaaatcacacagatgcattacttccaataaaaatgttttgaccacttatgacgtgttgcacttctctactagggcagcctcagatggcaccattctaagttctccttggaggaaaaccacatggctcagtgagaagccatgtttatcaattaactggagcaacacagtcttatttactcaaataattttctagtcaacacatccagcagccctgaatcaccatttccctcctgtcctgccccacaaagggagggatgtttgatgttacagctagtgtcacagctttcagggagagacagttgtaatctaattcctcaatttgtcaaacaggacattttcattacagctggacccagctggaaatgaatcactcccacacacgtccccaacaaaacataaaaggcatttaacagagaaagacacacatgtactgtacacaaacccacaaagacagagagagagattgcttcatcaaaccaaactgagtaagcatgaaaccgtactacccatctaatgggagtctccattccactttgcattttctcaccctgggtctttgctcaaaaggtgtcctctgcctgaaatgttctacccatctattcctcaggtccaggtccgaaaggaccctgtaagatttctccagttggaacctgtcatgacctcatgtgtgctctcagagcaatctgaattatcacagctctgaccggtctatgctatattgcagctaacctggcaccccacaaccaccaccccattcacctgtgaacacctttgggacagaaagcatgtctaattcattctgttacccttccctcagtcatctaccaaaaaccaggcacatagtaggtgctcaaatggcagaatcatgttaaactgtacttaactcatgtgaggccttcatgagcatttaaggtttatattgccaaaggcaatttgtcttacgggtaagctttacgatggatcattgtttcctttcccagtttaaatgtgtgtaggtatctctatggggaaagggacagaagacagggttctatcatttatcttttgttgccttctggaaattttgcctgtttttacatataatcattcttaaacctataaaaatgccccgagctgaaaattttaggtgaagccatgaagaatatactgaacccaattctacgattctctgggatgctcctgaaagtacaaacaaacctccttccacttctagcctttttttctcagtagcagatgatatggtgtaccaaaaatgggctttggcatcagaaagaccttagctgtccattggccagaccagcctttccaatgctcagttcccccagctgcaaaaagggaataagattacttcccaagcagatggacataaagaatagataggatataaaaagagcctggaacctagcaggcacacatattaaatgtcagctaatcttaagtgttgtgggctccaaagttaaggaaagggggcatggctatttcgagtggaaagagcgagtagggccctattaccccttagaccattctctggaaggttagttgacatcacaatgtcatcttgctcttagatccatccttctgaaccatgatggaactgccaagcccagagcaagaattccatggaagcagtctggagagagaaaggaacactggctctgagcattccttactaactgtgtcaacttggtcagtttacttcacttccctgggcatcagctgaagaaaacgggcccagaatgttaagtaaagcaagtcacacagttgcttagtccacagactatggaatctggcaggcatgaaatccagccttacttcctgccttccttattatagtggaggaagttacttaattttagagccttttctcatttgtaaaaaaataggacgtccacccacatcaggttatcatgagaaaagtattagataaacatgtaaagagtttagcacagtactgttacctagtcaagaggtgccaagccctcaaaatcatgtagctagtattttattagcaacattaaaaatacaagcaaagcatttaaaaaatacaccccaaaattcacagacatatctagaaacacatacacacacacatgcaaacacacaatgcacatcaagtggggagaatgatcagaatccacaaaagctgaaaaatggggaaactgaggcccaaacccagagaaccatagagcagatccccaaatatttctgtgtgaagtctcggcccaaggtctaggtttgctttctcagaaccactaaatccagagagaatgatggaatacacaaaattacagggcttacacagagaagagaagttatcactatggctactatttcaaatccaagagcaagcacctctcttggaggcctgttaacttggttttgggtcacagagtaaacatttcatgaccaacatctgaaattttccattcaactttgaagaaacagtctgatttgatggcacttgtgaagtttacagcttctgctctgcatctttctggtgcttttcaatgaagatgttgagtgcttgttatcattacaggtctacaccatatcaccaatggcagggagtataatgaaaactctgtcttttttcctgctgaaagagaaaacctaatttcacccagaagcccatccacaccacctgcactttttgaatattcaatcccacttcaagttaaataaccatttttatgatcatttctgtgattatgtcattgtactttagtttacagtttcattatttgtacactgtcaaataaaaaataatacaaagaacatctaattttacttcaacacttccaaaaatttcctaatctccaaccccaaagtggaattcaacatcaatagcaatgcttttggaaatattccagaatgcaaaacaacttttcgttttcttattagaaactctggattttttccctcttctgaatggctgaaagtagaataaaaaggctgcttccttagttaatctcagcctgattttctttctacttctcttatcactttcttcaagtaaaaggataatctttattaattttccaacctggaagaagccattaatatgtcaatgactgattctaacttgaaagcacatgcagcacaacaggcacaattttcattttatttttgtaaaaaaaattttagaaaatatttctatataaaaatctaagaaatctataacagctaaaaaagaagtttttttttttaaagggaaaataatacactgacaacttatctaaggaaattctattcacattacagaaagaactagcagcagcaacattcacagtgattcaagcacaaagcggttcaatctttcatatggaaattctgtttggaggcgaaaccgtgtcatgctctattttgggtaagtagctctcaaaactcaagggggaattacaattatatatctactccatactaccttattatctactccttatttcctaagcacccccaaccctagtccaaatcagttggatttaaaaggctattttataaagaattataaaccaacatgttttaactctaatcatctttagttgatgggattacttgagatttttcatctttatttctatagtaaaaaggcatggctggctgggcgcggtggctcacgcctgtcatcccagcactttgggaggccgaggtggatggatcacctgaggtcaggagttcgggaccagcctgaccaacatggtgaaaccctgtctctactaaaaatataaaaaaattagccaggcatgctggcacatgcctgtaatcccagctacttgggaggctgaggctggagagtagcttgaacctaggaggcggaggttgtggtgagccaagatcgtgccattgcactccagcctggccaaccagagtgaaactccgtctcaaaaacaaaacaaaacaaaacaaaaaacaaacggcatggctgtaacaatttttttaaagtatggcagggcatattgccatcatgaaacagaaaggttcatatacaagtcacaacaccagaagattaatattttcgccaatcatacagataaaattatcagactattagatgcatttattcattcagtagtatttctggagggcctattatgtgacaagcagcatgcagaatggaacaccatgcctatcccccagaagctgagattacagaagagactcacagccatcagggaaccccgtgaagcctcatgggtgttgggccacagtgtgcacagagcagctggagctgcaaggactgggctgccaacttctaatggggactggggaacagggaaaagcagtagttaggaagggtctcttcagaaggtgacatctgagctcagtccagaaagatgagtaggtgttcatctggtacaggaggaggcaaggagacgtgaaaatgcaagaggcttccagtttgcttctgctccttctggcagcagcagaaggcagaggactctaggtgcagctgttaaggagagtggacattatcctataaaccacaaaaagttgctgaggcacacatataaagaggtactctttgattttcaggtaacaacaacaacaaaaatatcaagcacatcaaatatgttccttgggtaacggaaaaagaaaagcacatgatgaaatattattacaaaatgccagctcttcattcatttctattaaagtcttctacaaacctcacagcctcccaaaagttctacttgtgtttcacatagattcagctagagttcagagacaatatatatggtctctttttaacttttaaaccacaggatgagtaaccaaatttgaaaagaactttatgccatgaaacaaatacagttatcttcatattattctacagttcttcacaaccattctgatagcttaaagcttgcttctagctgtagcatgtaacagaatatacttttatttaacaattcagagggaaaaaaacacaagatgaatgaaaaggtctattatatttcaagtgtgtagtgatttcctgtttctttcacacttttggcagccatgtgccatgtcacagagtactttttatactacaacatcaacaaaaatctcttttcagactctggaaaaactgggcatctctctcaaataccaacagctctccatttaataatacaaaacagcaatgtgactaaaaatcatcatcccactaacaaagtacctttgtcataaataaaccctccctttagattatccaaatacatatcagacctccaaccctcctttcagaatatcaagcatccctccttgtcttcattgccttcctgtgcttcctgttcttcttccccaaattctctctggccacactgctctgtcactgggtatgagacggattaacgatcactgatttattctctcctcccttcagagttcagactgggatccagagagctaaagcatactttttgcctattacttccttccctaccacaagcacttacttccccagactattatctcaggctgtattccctttcattttcatttgatgacactgatcatctttatcaccatgaggatgaccattaattggatgccgatcatgcaacagaccctcagccaagcatttaaatagattgcttcatgtaatcctcactgtcattcaataaggtcactttatgacccctattttacagaggagaaaccaaggcttggagaaactgacccacagagaggtgtagtaaactgacaaatagtgagcaacatagccaggattcagatgcaggtccatcagattaaaacttggttggtcacactaacttctactcagaaatagcaaaatgaatgcatgaaattgtcctattattcatgcatactgaaatatgaagagatcatgattcaaagccagaaatcaacagtgcctaaagagcatacaaccaccctagtggaaaaagagatggaaaaaaagagttgggaggcagattctgggcctgactttccctttcaacagttgatcaagagtacagcagccctgctgaggctgtgtctcccacaccaccccactaaggactactgggctctttggtcagggagagatagtctgaggttaagaaaatgtagctcaggagaaaatcctgtgaacacaacaggagtagctactctgtaggcttgaatctaaacaagaggttaataaaaatgatatggaaacttatttctcttatagtacttctgagtcagtcaaaaataagtttcaggacactaaaagaaaaaagtgtgaactccaagcaacttaatggttatgaagtatgattactgggaaatgaaatttccaagtgagacaggaaaagagagccccagaataagaccaggctgcatgcaatgaagactactcaactccaaactctgtctcatcagcctaccagagatagacacctgggattaagataatgcaaaacaaagtttcagaaacagccctgtgaaaacaatcatatcacccaagataaatgtttgctgaataaattcagtgatcaatcaactcaaggcaatgattcctgcttcgaacttaataatcacagtgggggagaagaaggcaaagttacaaaagggcatgtgtgcgggagcatgtttaaggttatatatacatcaatcatccttgctattcctagtgtggtcagtgaaccagcagcagtggcatcacctgagaattgaaaagaaatgcagattattgggtcctaccccaaacctaccaaattagaatcagcacataataagctctccaggtgatttgtatgcacattgaagtttgagaaacacattcaaagcaagctggataaagacaaggcaataaaccaaaggaactaatatgtgatgaatgtctactatgtaccagttttggtattaggcactttacatgggtaaaagaaataaagactaaggcaggatgaatggtgtcggcatctatcatgtgatgcatcaaagagattcagaaaagatgccatactcttacaatctgagaggagcatggtaaagccaaccagggggaaaaatactttttgacagtcttcattttgacataagtcaccgaacagtgacaaaaaagtacctatttgcattgtctctaaaagacggtaagccagatagatgtcagacctagcagaaaagctaaaaagatactaaactcccaatgaaaccaccagagaacatttcaagaaactacttctcccaaacagctccagtctcataaactataaatttatgaaagaataagagagaaaagggcaaaaaatgtcttgaccttagtataaaaatagttttgatctctcagaacccctggaaggatcctgggacttcccacagggaaccccagaccatactttacatatctttacaatagggacaatcacaaatagctaacccagtcaggactcacatcagagtttgtatgaggaaataaggaaaggcttgggcatcaacagcaagaaaataatgccacaggttggtaaaagggtgagattaattcaaaaatattttaaaagatgttcatgttttccatgttaaattacatttaagtttgatttaggatctgcttacttgtaactatcatcttaactccaattgagtggtgcatgcttcaaataagatcataggaaaatcactctatcactcatattaatcagtaattgggttgatttcctgtaccaccaaccacctgcatttgattcctcattgataatcaaggcaactttttgcttttttagaagtctccagtgtaacaaaaatgagtacactgcaaagagagccctgttataaactgtaaattctgaacgctaattaagcatgctagtcctctccaaataatcaaatcctaacatgtccatgataattaacagaaaaaaattgttacataatcctatcaggaaataaaagttggttatgtatagatgggggtgaaggaagaggtttctctccttcccatgaaaattgaagtactaaaggctagccaaacctcatccacaacttctcaaagaccttctgtaatacatctgttttcatgcatttctttccatttttataagtcttttactttcctctcctctcaacttgaaatctcacccatccaccaaaacattctcttaagtcagaacagagaagaggcaatggccagacttggtagcaaactcccttgatcctaaaatcgaacctacatataaaatagtgacagccagttccccatggggatggcaattatagcaactatttctattgtgcatttactacataccaatgtggagtgtaagatgcctaatccattacttcatttttgcttcacaacaatcgttgaaatacatattacactcattttacagaggaagaacaggctcagagtggtgaagtggcttgccctagatcacatatttgggcactgggggataagacgacctaaggagcctgtgatgctttacatgcattcgttcacctcaccctcacaacagacccatgcaatagtacaatacaaatattacagttcagaaaaaggtatatatttataggtgatgctggcagcagatgcctaagtaacagagaagtaaagtaacttgcccaaaactgcacagttaagtggcagcagcaggcttaacagtacctacctaaatggtggtcatgaggtttacatcagtggatgtagttaactacctgacatacagcaaatactcaataaaaattagctgctacaattaaagtattctgcataggggaagtattcaacaaagaacagccagcaacaacagaagatacgtgtcaggtaaataaagacaggactctccttccaagaaaagaacattatcctgactactccccaatagctttactgcccacagtcatcccagcaaacactctgcagtatctttaatgactctagctagtcatgcatctgtgtggaattttttccatttcttttattaacagcaggcaatggggtgtgctggaaaatgtacacactgggctaacagtggctccggttccatcaccttcaaactacatgacatctgtgggcctggtttcctcagctgaatgctgaggacaatcccatctcccctgccacaccaatgctccacacagagagccagcagaaattctgacttcctactgctgctctggctgccttgttgcttcagtggatcacaatccttctgaggactgtttcctgggcatttcccccagagcagcagttgctgggctctttctgcacactggttggtccagaattgggctgctgggcagacaatcaaaatcacaagatgggggcagagtaacaaaagcacctgggcactaatgagcagcttattccccacctaagaagtgcagcagtcaggaagacagcacctgaggagagagggggaatgaaccctcaagctcaaggaatcctaaggaaacttaaatacagatacagcgactcttcattggagagactttaaaaggtctttgtcatggcaaaagccatagacacgaatcatctcacctggactcaacacttaaccagtagccacccaccctctctaaagtttcaagcaaggtgacttatctgggctatcgtttcttcaccaatatctcaaggtaaaataacgtaaagaaaaattctcggtaagaacaaatttaagacgctggaaactttcacacctgtttaaagaccatgctgtggaagaggtgaacaaacagtttaggactttatggagagaaaattttaagaatcagcaaatttacaagtatccttgagtacatcgatgcggtcagggaggggaatatattaatagcaagtagagtcggaagtcagcaaaaagaaggagctatcacaagattcaacatggggtaagtctcctccacttgaaggcagtgctctatctgcttggtttgtagatgtttaaaaatagcttccttcctgacaaaatcatcttagggctcaaacacaaaaaaatcaattacttaaaacataaaacacaatgctataatcaggaagtgttttaaccaataaaagcactaacttaaagaggtatgtctggttctgtgccctgaaggtcagttggcagtggctgtaaactcaggactgatgagaaatctcaatgatgtggaaaatgagatggttgacctccatgatttctaaggctccttctggctctaaaactctaagattacactatttcccttgaaatcctgcaagtcctgaaattcctcccctttccctcttggtcagtcctacagacagtacttcttctggactctccttatcctcacttccaccatacacagagccaggctcaccttgcctaaattcttcaaggcttccgtgtgtgtacatttgttcattcaaatggggttcattctactgggtcgcaggctttggagataaacagatgaataaataagtcctgtcctcaaaacaataatgcaataggcttaaaaccaacatttcggcacagtgggttctacgtgaagaaaaggctgaaaggactggctggagaaataaccccaaataagtcactgtttaccaaggatcccacacatctgtgtgaaaaaggtgtctacaaggcaaaggggaactttctagggaatgaaaaacacctgggttgtctctgagaggaagaagacagggctctgcagaaggcctgcagaaatttagcctacaaaacagtcaaacaaggttagaccctcaggaagcaaccactgccacttcagaaataaacacaaattaactcaccctgggcaataatttatgttgggtgtggaacaaatcactctgtctcccttcatactatcacttttctaggagaaagggcagaagcagatattaaatatctgattagtaagtattcatggcatttatactcttgtacccaatgcataaaatgtgtgtgtatacttaaactttgaatttaaaaatgttcattccacatctcctttttaaaaaggctataacgtctaagaaagcagtgtgacatggaacagttaagaaacttggtttgaaacttagctccaccatataacagttgtgcaatttgggcatttattgatcttctctaagcattcattcacttcctgtgaaatggagaaactctgcaaagctattttaaggataaaatttacataaagaacttagcacactaccaggctccaaagaggaagcttaataccttgtgactcttatgatggctcctgcatgcttcttgaggctgaccaatcattgcgatgaatgacaaaatctttccaaagtcttcaagggaataaaatactaggtttttttttgtttttgtttttgtttttgtttttgttttgtcgctggggggcagtggtggaggggtggttttttagagtgttttttaaccgacattaaatgtgatacagtaacaccacgtggctgtgagggtgcttacagatcaaattaagtcactaagtctagtgacaagatgcattacagcagaaggtaaagtcgacacaaaacttccaactgactgctccagagtgaaacacacctaccacccacagcttgcctggatgggtgcagggcgccaggaaggccaccctgttctcaaaaatggatgtatggctcaagtgttacaatgtcaaactcctatccatgactcactttgttttcagtaagctccatgaagcacccacagtgtctaagcgcttgagttgacttaaccaagcatcagttgtgggatcttgggtaagaactgcaagcagagcagttaatggcagagacttggagacttgagggtcagacagatctttgtataaacctcggttctttcccttcggcagtaaaacctgggacagaaaactgctgactgccaagcctcaggacccttacttgaaaattaaaatattactaacattacagatttgttatgaggatcaaaggataaaatatgtgtcaacagcctggcacctcttaagtagtctctgtttccacaatctataaaatgggaaccagagcatcacctgatgaggctggtgcaaagattaaataattccgtgtcttcaacttgactgcccagcccagtgaaggacacgtaccaagtgaccaaggttcagtcaccaatggttcacgaacaggctttagggaagtcctggcaccaaaaagagaaacaggaaaagcatttatttatataattatttattaacaaataagaggtaaaagagcagcaagaaacgagagtcaaactaggagactcttggcattgttttctaagggttcactggaccgagagatgggaagagacagccagctaccctgtaaggtgtgacaggatctccatgcccaacacctaaaactaacttcagcataagttgctgtaatgcctcatcaggcatttatacctttgagtgaaacatgggagagatttccttccaagagttagctgaaagcagactttggaaaggaaagtgtcggtcctgagccagggcattcacggtgaggtggaaaagagaatgtcctgagaccccaagggcaatcaagaagtcttagggggtgaggaggatgaagaaggcaaattggcaagggtggcactcatcatgtaagaccacagacctcagagacacaaactccagcttcccctgactgcacatcctcgtcaagtcactccttccctcagttttctcatctgtaaaatgaagttaatattgtttactttccagattttctcctcagaacatccagtaacagaggccttctgtaaaataccgtgggtaaagtactcagcatgaaacccagcacattctaccaagagtggaccttgacttaacagatgtccattctaagctgaaatccacagggaaagatgctccagatagctgctatttggccccctagggaagcagaggcccaatatacccagaagcaatttccaaacactgaggagggcctctctgaaacttctggaactgagaaagcaccatcctaagaaaaacaaaagcggctgttacaaacacaaaacgtaacaaactcacatgacaaagtgatggggttccctagccaaaggacagctcaaggacaaaatgtgaaatataacttgacttttaaaaaagatgccaactctcagaaacaagttaaagttgcttttggcaccttctcctcctcctcttctccttcccctcaagttgctccaagaacctggttgccccccaccctacacccctccaggcacatctaacttctacccctctctccaagatacttcccaccctacttctctgccaagtgttaagtgggaagcaaccaaactaattcacaaccatgtgtgaacgaaggggcagtacaggttgggtctgtgaaagatacttactaagccaaaaaggttttcagctggagaaatgtcctgtgacttagtcatgggaggttaaaatgttcaggcaaggaagaatggaggcactacctggggtcaggcaacaggcaggctagaagctggccatgtctggtctttaaccatttccccttttcatagtgaatgctatttatttatttctgagcccaagagagaggccttaacaaacttatttccatggtaagcaggaatttcagacaagaggctgtatggggcagatagagaagtcactactaaggcggatacgggctgataaggcagagctactcaccaccccctaacactgagatgacactggctttcagtctgctaagcagagagtttgaaaacacccacactcactcctttttcccttcactactcctactcgcttgatgtaacttataatgcaccaacacacacaagggcaacagcacattcagagcccagttttttcttttggagaaacttaaatcgagacctcaaagctgtccctctgtggagaaaagcactttcctaggctgcccagggctggaacaaggcaaagaccaccattctggtgaaacaagctggcaatatgacaaatatataagaaatttattaatatgcctggcctttgagcctctaactccaactctaggaatctatcaacactagagcagaatatgacagatatacacaaatattcaccgctccaaggtgaacaacaggtcctccctttggtgaaactgctaagccaactgtacaaaacacacaattgggagcaacttaagggagggagggaaacatttaatacaatgacatgcctttttaaatattattgaagactttttaatgaagtggaaatgttcatgatgtgttaaatgaaaataagcaggacagagatgtatctgagcaaaatacttgaagtgacagtagcggctacctctggttagtgggcttatggatgacttttaaattttcttcttttatacttgtcctcattttctacaaagggaataggttcttcttattctttagtaagaggaaattattaataacaaaagtctgttaagagtagactgtagcttacgttaaatgacagtgcagggttgcagtcaacactatccatactatgggaaactacgggataaaccaccactttctttggcaaatgaattacaatgaaaaaaagagggaggaatccacagattaaaagaaatttgaaatatgtccatgaatttcaacatacagatctcatacagatccgtttaaataaaccatttttttttaaagagacaaccagggaaatttgaacagcgactgaatatttaatgacaccgaggaagtgtttttttcagacgagaaaacatattatggttcaggtttatttttttcaagtccttatcttttagaagtacatactgaagtatttacggatgaaatgaaatacctgatattgcttcaaaaaatcaggggaaggaggcagaaatgaaaaaaagattggccaaaagcagacaattgttgaaactgaatgatagttacatgtcgctctgctattgcatgtgcaaaaatttaagttaacagcaagcaaactggctgggcacagttgctcatgcctgtaatcccaacattttgggaggctgaagcgagatcacttgagcccaggagatagaacctgcagtaagtaagcatgattatgtcactgcattccagcctgggcagcagggtgagattgcgtctcttaaaaaaacaaacaaacaaacaaacaaaaaacaacaaagaaaaactgcccaaagtaaaaaaccacttggaggactgagctactagcgcaaaacagactataaaaggtatgggggaggtggggaggaaggagaatctaataatgcaaagtatcatgaaattatccaataataaaacccgtatgttttagtcctaaaggtattgttttagttacaaattacttgacaaaacatctccagcataggtctgtctctttcaaagtgaagggggagactggttggcagaactgaactcaagcctcatcatgctttttcagtcaaatgacctttgagaaattatttttaactttttgagcccgtttcctcatctgtcaaatgagaaaatagtggctttgttgcctaacaaagtgttgtgtggacgaaatgagaatatattataacagagcgcagaaatgctggagagtaaactcagggcaccaactgctcataaaatcatatgattcactacttaccatccataaagaaaaatctgagaggtcaatactttttgaaaataccaattctctcattaatccctttcataccatattgtgactggctgccccagatgcatgatgtaaattatctagatttaaatgcctccccgtcaactcgaaagaaacaagtcaggagggaaaaatgctttccttttccactggcagatgcatgtcttgtttgtgtctctgtatgtgtgtttgtttccaccaagaaagtaaatgctaaccagattctcttccgtttacttgcactttgcagctaaatcactaataccaaagcaaggcagggtggcagtggggaggtgggggctatggagccaggcaaacccagatttgattcccacctccctcaggtactagcagggtaatgtgagagtttgaaacagcctatgtaaagtactcagtacaggctgggcacaggtggctcatgcctataatcccaccacttttgagaggccaagaaagccaaggcaggccaatcacttaagctcaggagttgaagactagcctgggcaacatcacaaaaaagtactcagtacagagctggtactcaaaaagtgacagccaactctgtgactagtattactaggccaacagaggactgcaggttgcagacaccaaaaggacagactaggaatctggctttagcattcaggtctgctaagcatctgcagcacaaccttcaagaaatttagtaactgtgggtttttccaactgctctatgcaattggtaggcatatatataaagcccagagaggtagacttaaccgtatttggaaaactttttaccaggtctgccttcaagatttataaatcaaatgtagttttgctacaatcttcataattttactcaaatatctgaatgctaactacattaaaaacaaaacaagtttaaaaacctagggttaaaaagtgaggggggatgtccctgaggtacttacaatctactaaaagtgaagacatacgtgaacatgaataagaacacaacttagctcaccagcctatcattgacaaaattatcccaaaatcaggaagaaaaaaatcctacttccatggccatccggttggtatttaatacactgtcaggaagttcttctgagtctaacctacatatctcatgtctcagcagaagcctatttcctgtttgttctttttcattagcattgcatgcatatctgcattttttttcttgaggatgagtctgagtagaaagagcataaattgagttgaatcctttctaaacctagttcatcatctgtgaaatgaagaaacagcacccaccccacagggctgttgggaggattatatgagacgatatgggtagggcaatcagcacagttcccggcatagagtaggttcttaacagcaatgttcgcagattctgaatttgttcaaactcttacacacaaaatgcagaagccttgggatgtgacagcactgacttggcaccagtttatttattgggaggcagtgtattcacttgccttgctatgaaaaatattactattattaaagcagcagcagctgctgggccagcagtgagtgcttattttgatttgtactttgtggaaataaggagtatctaattttatgtaaatgctattaatgtgaataaacattacaaggaaaaggaaatgggcatcataaaaaatgattaatgcaacataaaggaaggctccccatgtttcaaaacaatgaagacaattttatttcgtatgtaactgggcagtgaagaagccgttcaatggaagtaaagccattagtcctcactggacctttaagcaggctctgttatttaacactgaggaaaaaccaattaaaccagaaattttccgaagacagccaagttgccctgcctggtcttccatccatcctggatatctacggaaagattattcaaggagcaccatgccatcactttggatttagtggcaatgggatgtttcttttctggccataccctatgtggaatgttgatttttcctgaccacatcagcaaagctaaaactaggcagcacagtgctctgaccacagtccttccaagtatcccaaatgagtacagagcagaaaggatcaaggggaggtgacacttgcagagggaagggcagagaaactaacatcttccaagcgtcactgagtgccaggcatctgcctcccttatattcctactgattctcccaacagctgtgaagtaccatcatttacatttaactgtcatgtcaatgaaaaatgaagatgaggccagaagaactgaatctagtcccagctttgctgtgtgatctgggtataaacggtgtgcttccctatcctcctactctcctctgaggaccaccatcacccccaggctgaagacgaagacttagccccacccatcacataaccccctcatcctggccaaagctgactggagcaagggtggtctcctgacccaagtggagccaatccaatcctccttcccagatatcctcgcctcagaatcaggcagacaccaatgtggtgtagggcactggagctgggaataatttggtgcgagctgccttcatctaccatttgcccaaaagagaagaccctcattcttgcccctcatgttccataaaatatctcccatgaatccttccaataagtccccattttgctttaaccaatgtatttcattttgctggggaaggggaagggacctcttacaataaaacagcctaacacacttggggtttctaggcctcagcttcctcatccataaaaagaggagttggactagatggtctctgaggccttttccagttctacagaatgtgcgtcataataacatagtcctcactatacttacagcccactgcgtgctgggtgctataccaggcactggagacaaggccattctgaccctagcctttgggtacaatgctacagaaatgcaaggtatccaggctattttaataatagagctaagaagagcttacattttcctccacccaaaacgcatctggcagggaaaggggtggcctagattgacttagccaactctgctttctataatagttggtgccaaaatgcagtcgtcttttgggctttacctccttggcatatgaggttctgattttattttcccagcttttgagtggctaaattaggtgctgtcttatcaaggggacacatattccagttctttgggggaaaattataccatagcttggcattaaaattcagttcttacacaactgaccacaaacagcaccatgacagagggctgttcagacagggctgtgggctggaaagagcctactgtgaactcctggattctgttaagaccaagtagagtcaagtgcctcctgatcttgacctaactcctgcccacaaataattaaaactcgttttactgacactgaaaacaagctatgaagcacacagaaatgaaaattcaaggagagatctcttttgctttaaggctcctgcctcctaaccaaaatagaatttcttgtggtctcagtgcttcaaactgtaatcagtaaagcacctaacctagctgccatgctctgtaccagtcagggccaaggcataaatgtttcacctccccacaaatgaccacaatcaattatgcaggtacataataaatacctgcatttattatgtaacagagaaaacagctcattaccccaaagccccagcaagaatcagaaggggcagctttcacacaccaatggagaggactcgacgagtggggtgtagaagaaggcagaaagattatagcagtgacacaaggaagcatgggcaatgaggttgcactggtagagcccatcaggctggcctgggtcaaagtgggcagcactggtcactggttcccttacttcagagagtacagagcccactaagggctgattatacagttacactgagttgacagtctgcttcagatcaaattggctatgaccatgacccacaatggtcaaagtgtttggtgttgccctagtcctctccttagtcccatctgtgcctccccagtccgggtccctgaagtatacacatctgacttcatttctctgtcatctgacctcatcactgacccttcagaaatgagtctaccaagtctcatcttctcagttacacatgcaattgtctaatgcaataatacaataatacagggcaatagcaacaaggataataagaacaatcatttatagagcacttagcacaccaggcactgttgtaagcactttacagatactgactcactgagaggtaggtacttatccccatgaggaaagtaggacacagtaaggctcagtaacttgcccaacacacgctagaagtaatagggatacaattaaccttggcaagagaatttcaccctcctcaacccaagtgttgccactggtcctcagtagagagcagtcctacctatctaactctccatgaaggaatgcttctagcctcatttgcctccccttcttccctgcctcacaggagagctgagtagtcagaccttgacacccatagggacatactttactgacacataaagtcatttgatgagtgcctcccatgcattgcctcctttaatactcaaaaagcaatgtcatttatttatcaaatggggaaacagaggcttagacatgaagtgtagccccaaaccttactcatgtttaagtaatacatgtgggaatggccaagacccagatctggttttagtccccaaatgactaggttacatatatggaaaccatctctctgaggctccctggacaaacagacaatgaaggcaaaggtctgggtagtgtttgaacatccaacaccacaaatggcttctaatgaaaggctgctagcctaacatcagggaaagctactgcggcctcgcacagtgtgtcttctgagaccaggacttaatgacagcagactgggctagcaagatccagttccaaacttaaggtttactctccactctttccacctagaagcaagttacatggagtggtactggggaggactcccagactgtgaattgccagtccccacaaccctgttaaacagcagagtgcaaaaatccctgggttgggcagccctgaattcaaatccctgcatggtttctgtctcatctttgggcctcagtctccacctctcaaagcaatgaggactaaactagatctggtgggtcccatcattcatgaggttcctcccgtggagatacaaagcccttctaggaagccaatcacctcaatgaggtaacactttgctttcccactttataactggcaatccaagcatctgatcagcagaagatgattcgtcctacaccactgagctgatgcatttcagccaaaatcaaacacatttggcatgagagttatgccaaactaagttactagcagtgtccactaatttttccacaaagtggctacagacccccatcacagctttcatgagccttttggagatcaggctttcaggttggcaaacgccagagtagatattctccaaggtcgcttttacttggacacttggcaattccctgaataactaacacccagcaaaaactcagggctcttgtacagccaggaagctggaagcagacagccagacagccctgaagaaactgcaactgagagtagtggttctttagccagggctctgggcagctcataggcaaatcaggttgggtcaacagtcccagactaagcatgccagggtggagctggaagcaacagggtcattttcacatctgcccagtccaaggaggattgcttgcagcactgtctttgatcacaaaaggcagagatttactgaggggtccagcaagaggtctcagaagaacagagaaaagcaactatcttttcatttttcttccctctcccaaactctttctctctagcactagaaaccaaatagaggtaaaaagataattaatagatgcctttctcacgggtcctgcaagacaaaacaaactggcagacaggaagcataaaagacagtgaaatacagaagaaacggaatgggttttcaatgcagattctgcattcagagcccaagtctaccatttaccactgtgtgatcttggacaagttatttaatgtctgtgagcctttatgtattcatatgtaaagcaataataagaatgctactagaataagcttttattagatgataggtgtaaaaaatgttttttttaaatccaaagatatatatataaggtgtgttaggcagttcttgtgttgttataaaggaatatctgagactgggtaatttataaagaaaggaaattctgcaggctgtacaagcatggcgctggtatctgcttggcttctgcggatgcctcagggagtgtttagtcatggcaggaggagaagtgggagcaggcacatcacatggcgaaagcaggggcgagagagagagaaaagtggagacccaaacttttaaaacactggatctcaagagaactaattgagcaagaactcacttatcaccaaggggatgatgatgctaaaccattcatgaggcatccgcccccacgatccaatcacatcccaccaagccccacctccgacactggggactatgtttcaacttgagatttggaggggacaaaaatccaaaccatatcaggaccaaaagcattagcatggaatatctggctaacaggcttgtgccttgttttagaaagagcatgagttccaacatatacaatttccttctccctttgattctacagacagatatattcactcactgacctttgctggtttcatccagacaaaacctcatcctaagtacctccagactgggtcaaaagcctgggcacagagccttgacttgtgtgtgggagagaaacattatgggaaggtttgtttgccttttgttgtattatcttcaagaggtcagagacagacccaaacatactttctctacattaagcaaaagtataaatcttgattttagctaaatccttcctaagggttttttttttttttttttaagactacaatctccttgggggtaattaatgggctccttaagtttagcacctgcaatataaagaagcacttcctattaagtttaccagcttttaaaatttaagaggtaatgcacttgcattcttgagcaaggggagctgacgaacaagatcagacgtcaaaccctgaccacagaaatcctatgcgtaagatttcacagaaaatcacttaaggacctaacagtatttatcaaagactgatgagctctatcatcagcatggcagacacccaaaaggacatagataaaggctgaaacttaaatggaaggtgagggaacacacacagaagtctgactggcctgcatgaggacttgacagtaatgcgattaatcacaaatctgatactggttgtatgacctgggcagaatacttactggctgtacgacctagctggacaaaatacttaactgctgtaatcctgaatttcttcatctataaaatggagccattgatgatagtagggtgaaaaaaggtattaaataatagtatgtatagggtttgcatgtagtaggaatgttactgttatgagatagagcttgatactgaatctacattctgtatcttcattcatttcatcaaacatttctatatcttcagaaataactgaacacaccaggtgaatacattaagaaaagcctctaatgccagacccaaacttgatttccagtttccataagaaaacttttaggctgcattttttgagggcagggttcttcttcattgtatccctgggcctagcacactgctgggcacataggaggcactgaacaatctgtatattgactacatggtaatttgagtgatttcacttgtattcctaggatgaatgttctatactatttccctcccctatgaactgcccctttctaccctgttaaagagttttagccttatttctttatttcttaaagaccactagcttctccataatacaatctggataaccccaatacctcagtaggacttggaaaatgacttgtatatagcagggcctccccaaaaatgtgttgaacaaatgctgttcacggattatactcaaatgagttcccacatttaaatctgaaaactcatatccaaatcttcgaaagtacagggaaaaaatagtatatttaagtatcactattaagaactctgaaatataaacatgaagaaacactaagcctccaaggaacttaggcaccttttttaatcagaccaaaacttgaaggtgcaatgacagcaaagtctcctatgttccctataaagccactgaaatatgtttttgtagacatttagaatacctattttatgtctcaactgttttaagatttctaaactctgggccaggcgtggtggctcatgcctgtaatcccagcactttggaaggctaaggcaggcagatcacttgaggtcgggagtttgagaccagcctggccaacatgatgaaactgcgtctctattagaaatacaaaaattagccaggcatggcggtgtgcacctgtagtcccagctgccccaggaggcagaggtgagagaattgcttgaacctgggaggcagaggttgcagtgagctgagatcgcaccactgcactgcagcctcggcgacagagtgagagagcctgtttcacggagagaagggagtgagattttttttttttgagacggagtcttgctctgtcgcccaggctggagtgcagtggcgtgatcctggctcactgcaagctccgtctcccgggttcatgccattctcctgcctcagcctcctaagtagctgggactacaaggcgcctgacaacacgcccagctaatttttttttgtatttttagtagagatggggtttcactgtgttagccaggatggtctcgatctcctggcctcgtgttctgcccacctcggcctcccaaagtgctgggattacaggcctgagccaccgcgcccagccgggagggagatttttaaattccattttatttactagccacttgaccttagagagaaatcatttcatctctctgggcctcaatttccttctctataaaatggaaacgataaatgttcctctttcagagagctcatatgagaggtaaatgtaagcattcatgccatgtgtcgacagcaggcctggtatggagcagctgctcaataaatgagcagaacttgcctccttcattgtcaccaaattaaaatgtggcccaatataaaataaccaagtagacttccatttatcatgttggactctctctctgacaaaggtactaagtattagccactctaagtctttaaatagagggtcccttctactgtctgggtcacagcagtcctaaaatgcctgcctgctcccgtttagggaaaacgcttatgctctcctagtcacttactcataacttaaaaattgtcaagagtaaaatggcacacatcagtgtgctttcactgctgaataagtaaaacactggctttttgcttggaaaacactcacacgccaggatgaaaccttggcagaacaccagctcatccattcctgcctccccaaggtagccactcattgtgtgccagccaaaccgtgaacccctgagccatgtgtgacccttcgccccaaaaggtaaagcccagaagtaaaccagaagtaaactcctctttgcctcttcttaccatttttgagacgtagcctcactctgtcgcctaacctggtgtgcagtggtgcgatcttggctcattgtaacctcggcctcccgggttcatatgattctcctgcctcagcctcccaagaagctgcgactacaggcatgcgccatcatgcctggctaattttttagtagagatggggtttccctatcttggccaggctggtctcgaactcctgacctcaagtgatccacctgcctcagcctcccaaagtgctgggattacaggtatgacccaccacgcccagccttcttaccatatatttctcatctacttccaagagtgctcatcacagagatttaactaaaagcatcaacatctgcacaacacaccacaatctctaccaaggagacatagtaaaagaaagagtatggattaatttggggctccaatcttggagatctaacagtttttcagttgcgctctatgtatgtgcattagtgatctaaagagcaaaaaaaggtcatcaacaggaaggtacttactagaactaggaaaatgttttttttaaatgagaattccaagttacccaaattaattcctattccggagtttccatatcaccaaaaagtacccaaaagttctcttcctaagaataaccacaaaataacacaagccacattcttaaagtttccaaatatctcagttgtgaagcatatgccaacaagattttgtggtatgcccccaaattttttcttatattgagtgtggtaatgttaagtcccatatttttaaagaactgaattgtgacccacctaagatatttataataatgcactacttccacatatgtaagcatgggggaaaaattaaaattcaactatggtggctatccttcagtaaaaaaacctaaagcatacttttcacatctatgcaaaaagtaaccactcaagagagtgcaacctcaagaattaaaatatgccgaccggagacaatgttttcctggccaataccttcctcaagttcagaataaaaattgtaaaattattgtgccatcctgaaacattgctatatttttgagaacatgggtatcatcaatgtactctaacatgacactgaacttctagcctggttccaagttcctaagtgactacacttgcattatagttaactctatttttctacctaatcttacaacagtatttctcataaaaaaaaatatttgcttttaaatttattaaccttaaactaacatcaacagcaactgcatgtaatttaacattaaccctctactacagggttgctggaaaatatgctcgcatacctctacaaacagcatcaccgaatacttaatcttatcacacccttcacaaacagaatacagcaacactatctaaatgtgcaggaagagaacgttaaaataactggcagctctattaggaggcactgaaaaacttatctagaaggaaaataaccactcagtctaatcaatgtcacatccttagaagtatatacaattagtacagaaaggggatgcaaaatgctcctgtatcaacatgtttcaatttattacaattaagtgaaagacagacccatgatggggttcaatgcctggcaattctgtttaatcccagacgagtataacagactggcagttcacaaagacaaaaaaaaagaaaaaagaaaagaaaaaatccatttacctctggttttcaaacaaacctagttaggtggtatttctccattcacttcacaattcagtcccatcacccaatactgactccagagagaactctggaagtatgccggaatgacacattcagtcatagcaccaagcaggccagatgggacccagcactaacagaagtctctctcctcctaaaatttgggatccctctacttctgaatcccagttctacgtgtgtggaaacatgagtatcaaagctcatttcaagatgagtcggcccacagaagcccaagcttccccatattacagaggtccgtccttggggtggggggcttacatcagaaagagctccccaaacctcacctaaaccagccacagcataacccacccagggaaaaccatctcccttcctactttccacccaatggtgccattttcagttgaaatacgtttgccttgtttgaaggggagggatgctttatggcacttattgatgatgctgagttcctgggcaaatatcctatttttatcgtggccccagaggcttctgctgctccttggctttcaggttcctctttgcccataccactctctcattaactcactgaaaatcctaaagaaaatcgatttggccttggccctgccccccaccccccaccagcaacgctttcctgaagggtccaggtaagaggagctgtctgactgtcgcctcgggcctcccttctccgtgtctggtcagctcaagcaggctgcaccggcctccgatctccttgtccagcctcggagtgccctgcgggcaggtcctgctggcgcagcagccctaagccctaccaaaccctccgggttagggaagccgggtggaaacctatgtgcacagatctctttccatctgggcttcaggcaccagagactaacagggaggactcctggagtggatacagtcccagcctgagttctctctgggtcctctgggatttttccaacggccctcgtctccgcagctacgcctgcctggtccagtcgggccgctgaggggtgcgttcactgcccatctcctagtcccttgctggtgaccttggctgcactacttcgcctctgggccctcggtggcctgacgccacctacctcgagggttacaggagggtcacgaagatgtggaagcgccgaacagtgcatgccagggacaggacttccatcttctgtcctccctggagtgtccacagctcgctcagtcctctcccacctccagtccccaggcctttcaacccgcaagacccagaaagggcgaggagatggggaaggcgccgcccgtccgaagtcccttattcacccggcggctccctgagggggtgtggcgcccccggcccccgcgtccccttcctcccagctcggagaggagatcctccagctgcgcggcggcagcggcgagcgtggacggcgggggtcccggcccgacctacctcctccagcagcgtgacggtgttcctgcagttgtgcagccgcgtggtgaagctggacgtggtgggcgagttgtagtcctcggtggtctcggcgatgaactccgagacagagatctggtccggcatcctgccgggagggacgagacacaagcgggggcggggggtgagtcacggcgcaggctcccggggccgcgggccgcccggaggctcatgaaccccggcgcgcagcccgccacccgccgcccggcctggcgcgcggctcccgtccccggcagcggcgagagggagggaaggaggcgggcgaaggcaggcggcggcggcgctggcggggctcggcgcggggcccttcaaactccaagccgcgcgcgaggcagggggctctccgggacccgcctccctctgctcatgccggcggcggcagctcctcagcggcgggggaggggacgcggctgcgcgcggggtcttcgcgggggtctgggctccggccggccgctggggcgtgcgcgggctgggcggctggggcgcccggcgctgcctcctcagacgcgctgacaggcggcggcgcgggcctgactgactgagcgcacactcccgcggcgggcgggcgggcgggcggcgctcgcgctgcagtcacggggccaaacaaggaagtgctctgcgcacgcgcgccgcccccagccccgcccccccggtccctccccgcccgcgccccgcccccggcccggcccccgccccgccccgcccccgctcgcgcacagcccctggggcctggctccgaagctgccgctcccgaccccggctgcgcggcacgggggctccggaagcccgagtccctggttcgcccccggagcggttacttcagcgagctcgttgcgcgagcgttttgcaagaagggggcccaaaaaagttgtacgtgttcttttttagtcgcgtgtgggtgcaggaagtgaggccccgggagagccgccttctactgcgagggccgccgaccccgcgaaggaagcgctgggcgcaggggcggcctcccggggcccgggcttgcagctgcccgctcgccccatctctctgcagggtgctcctcaccgcttacaggctggttttgtgcagttgccttaggtcgctacaatgcagcgtgaagacgaatgaagggtttgggggcttttaaaaaaaataattttctaatctttcatttgcacttttttttttaacttgcaggaaagccgagggtcagggaatgtaaaaggcattgcccgagctgcaaatggtgttcgatgctaagcagatgccaaatttcggtggaaaaagtaccacctcactcctcggccttgacagatggctaattttaaaactagctcaatctacttagtccgaagaatccatttaatttctcaccattcgctgagtatgaatttggtttaaaagaagaagaagaagaaaaaaaaagctaggcctttgggaagggccacaggattggtacctgtaattcaagccaggagagcctttgatagccttaggatggaaggctgagcctgtcctctgcgacacacacccaccgcgccctacccctcacccccgggattgggcttctgccatcttgcactgttttttttttttttttgagacggagtctcgctctgtcgcccaggccggactgcggactgcagtggcgcaatctcggctcactgcaagctccgcttcccgggttcacgccattctcctgcctcagcctcccgagtagctgggactacaggcgcccgccaccgcgcccggctaattttttgtatttttagtagagacggtgttttaccttgttagccaggatggtctcgatctcctgacctcatgatccacccgcctcggcctcccaaagtgctgggattacaggcgtgagccaccgcgcccggcccatcttgcactgttaagcctcacatccgttctctggttcttacccctgactacaagggagtgccccaaagcagggatcttgtcttagccttgggcctgctacacagaagtagcagagtggctgtcaaaatacagcacctcattaactctcaaatatttactaagcactatgtgccctggagattgagtaatgccaaggcccctgctctcatgaagcttaccttctaggacagaactagacaactcacaaatacataaagtggagtaaatataaagtaagaaagtgaaggagtcgctatagtataaagaatctgcagagaaggctttgctgacaaggtgacatcttgagaaaagaatgacaagagtaagtcacccagataatcctgttgtctatggcatcttgggccctcagctgcctcacatgaaagcaaaagataaggacaccaaccccaggacctggctgttatgttgagttcactgatgatggaagagaaagtgctttgtgcacaggaaagccattagaaaagtgtgagatgttcacctccctctattggctgtactgaacctgcactgtgcctccagcgagatgctcatcaatgtcctctaagaggccatgcttcagctaacaagggttccagctaattaaagggaaattttgtaaggggaatgtccataaataaatattcttccctggcaaagggaagttgagaagtcaacttcaaaacacattctttaaaaaattagtaaataaataaacaggcacccactttgtcctcattagcactttaaaagcttggtttgggacacaccaagtttgaagttcagaggagacagccagatgatgatagcagacagctgaagatccatacctggaggtcacttgctcatgtgccatagttgacagaacatggtcttttgaagtatgagctacccaggagaaaatcctaccatccttccccacatactaaccaagtcactctgcatctggaaaattctgtgacttggaacaaatatggcccatgctagttgagctaattaagctctctgagactcagttaccccatggagcactgacaacacacggcacttaggcttcactccaagaaggccttccttcctctaggctggaaacaatttcagacttggattcttgcatttattttgttctcccatctattccaggtagtcgtctagcacctgtcacctccactgaggtggtggttccttccatcttcttcatctggcattatagtaaagactcaataaatatgagctgttattaaaagccaaaagtcagtgtttaattgcctcaattccaagaggccctgggttccagagttttccctcctagtaactgatgctgtcatcttgggccttagtgctatcctttgtaaaataaaggagtgagtgtgtcaaaatgaccacagattcctcccagcaggagccgacttgtgtatacagtcagctctggagatgcaaagaagaaagattattacaacaagctaagctaactgcaatggtagacagctggggatttctttcttgactgaattcaccaaagactccaaactgctgccatcaattgctgtttcagtttcatttgaagattatgttatgtatctgctcctcccccatctcctttggccaagaaaggaatatgctcacaatgagatattgtgctttggtaagtatatacctcctcagactggtctgcaattacaatttcaaaggttcacacctctactcaccatttctgggccataatcctctttaaatttgaaaccatgcctcagtgaaaaccatctgcacctctcattttctcaaatactctgaaaatcattcctggatatctgaaagcaaatagagactgacatgggcaaaacgtaaatgctggatttctttgtgtggagctgccccgaaatatacaccatcctccccaaagccaggaaaaatgtgcgcacacacatatttgtgtgcacctggctttatataaagcaagcatcatctctgttgtcgccattataataagactgttcagcactcttgtcctcctcatgcctgcctcttactctgagcactgctgactgaggtttctaacaccatgattatggcaggatgcactttgtcgccttgaaaaaaaggcagcaggaacagtggtggcttattcttctgaacagcaatggcgctaacgacccacttgccatcagggaattggctctcagttacatttccagttgcagacctcactctcatccatctgtcttataaccaaggggggatgcatttgcaagatgactgaccagaaaccagaggtgggggagtgtgggtggggagtcagaggtgctctgtgggcccaagaaaccacaaggagctttgatccacagtgttagccagcgacagcattcatcacaggctcccgatgccctcatggaatgacgacaatggctaaagtgggaagggaacacactttttattacatggacctgagcttaaaactctactttcttgtttattcaccttcttttctaaactatgtttcagattattgtgtgaaataaaatgagaaaatatggataagtaggctgatgcatagtgaataatcaaccaatgtgaattccctttgaactccccttttctgtgaaagatgactataaatacatctgctttcattccacgactcagatatctctaaattagtcactaggaggaggaaaaaagagggagcggggaaggctgcacagtaattcccgaagtctgggatctcagatttgggaataaacagtcttcagagacctcgcttattttcaaagtatcctttgttaggtcagatgcattagtgatggcttggattttggaggtaaataaatagtatctagagtcaaactggctgcataccaatcaagatgagaagtaagttaagaccaactcactaaaataaaataaaatagcctattttcatgcaacatagtccctgtaaagaaggataatctgagcaaaacaacttctaggggatgatagcatggggcatttcttttgcaggagcatgaattatgggctgattctcacataaaaaagataggctcccgtctctgccatgaagaagctactagaccttgttaaagtatttctcctctctgagtctcagttttcatatctataaaatgggggcaatgacaacccctatctcagtgttctgagaattcaacgagctaaggtatataaagtgcttagcagggtctcagacatcctaagtagacaattatttttccgatattatgggaactttgaaaaccttatctggagatataacttatgatattcttgccgggtgcagtgacacacacctgtcatcccaactacttgggaggctgaggtgggaggactgcttgagcccaggagtttgagagcagtctggacaacatggcgagactgcatctcattttttttaataaaaaataaaataaattctgatattcttgcaaaaacaaaatattcaccatgacctgctacgtaccagacactttgctaagtatagaatttagaatacatttatccttctttaagcctcatgacaactttataaagtaagtatatttatcccaaacttaccagagaaacctaaggctgctggggtatagaatatgactttctcagtttccatctggagtcaggtactgcattggtggttatatatgtaatgtctgaattcattcatataacagtcctgagatgcaagtattacaataatggaaactgagacacaataaaatctcactgcaagttaatgtccctgagcctggcagactctaaatccaatgctttttctgctgcctgcaaaattggtctctttactgtattctgtatagggctactttgttagatacagtatttttcccagcccaggcaaccaaaggaagtatctgtatttcacctgacaacttatgaattcattttctaccaacttaatgaagtggtggaggaaaggaaagtgctgaaggagcaggatggagggagggggctgtacttgattccatcttttacacttaggctcatgttcccatagtctacataaactgcttttttcatgttctttgtatgagtgcttcccaattgcactcgtgcaatttcaggtaataataataattaaaaaaagccaattctagtcccaaatgtacttaattcaatttaaatactccaagcaaaaccactagagttttctcagtaaagagaagaacatggtttgtttggagacaaaaaactactctggttctacctccctgttcctctgatggaagtaggaagaaaagaggcagaatggtgggaacctagaagaaatgtagcataaatatcaactgaatgaactcagggatgtatttctgtttagtcctatgaaagaataattgtgcttagtattatgcgccctgtattatcctgagtcattgcaggcgcaacctcacttaatacttgcagcaacaatataaagcaggtactgtattattccccatgttatatgcatgggaaacctgaagcttagaggttacctgtcaagtagtggagcaggactcaagcaatctgatttcatagcccatgtgatcagccaccatgctctgttggcttatcaaagacaatggatgagtccacagccccaggatgctttttctgttggggtatatgtgcgtgtgttttccttctggggaactcattacaagcccaattcaaatgcaagcttgactggtctagagagcagctccttgccccattcctccaggtgggattaatcttcatgtgggtatccacagtcagcttctctcactctgccttaagcaactggaggatattggcaccattcagaggagaaactgagaacttcctcagcaacaaatagctctgttagcagaagggcttggctctgactcatctctcacttgggctcaggagtttgaggctgccgtgagctatgattgcaccactgcacctcagcactccagcctggacaacagagcaatccagtctcaaaaaataaataaataaaataaaacacaaaaaacaaatgccaaacaaacaaacaccttgtatcttccaagtgagtatcctataccgcaaagtcccagactatcaatccctgacagcattcagggactaaatcctacccatgtctgtatcacctacatcccccagcaactaaagcaaggacagaagattcctggagccccaggcttggccttttacaagcaccatctcctgaaatcttcctagtaacctagtgaggtagtgtgttttctgcaagagaactcagagataagcacaatttgctcaaggttaacagttaataagtggaaaaatgctattcagtcagtctgaatccaaaccctgtaggctttttcttctctaggaaagcactgcctagttggggtcccttgtgggcccccataaatgtgttttgaattgaactggctcccttttatgagctacatcatttctaatacaagtaaaacaacctccaatgaagaaaaaaatcatggtgttttatgggagtcctaaaaacttgcgatctataggaacgagggatttaaaatcttgcttatttctgataaagtcacattaacctgaaaaatgagaaaaacttacaatacacccaggtttctttgatgaatttaagttgagttcatcacctttaatgatgcccaacttctgtgctatatcaagaatgagaacgttcctcttttatggcccttttcaatggtatcattttccagggtaccattttccaaatatttatatttatccaactagactgtgacctacctaagaccagggagggtttctatttgctattatggccccaaagtgccaagtgtttaagagatacttactgaatagaaggaagactgaatgaatgaatgaacaaacatttatagggggaagggtatgagaggaattgagagaggagaaatggagagatccagaagagagtaagatccacagaagtgatcccggtttttagagtcgctgtcattattttacatcactataagccataagagccagcgagaattttaaggataacatgctttccaaacttttcattttttggataaggaaactgattcccaagcagttaggtgacttgcccagtgttccctgacagatttgtgggaactgagccaaatgccaagtatcctggttcccaagggtttcccactccacctttcccagttatatttcaaggataggattaaagaccttcagaaactcccgtctacaacagattatgttgtctttgcatcacagaatcaaggaatgcctatgcacaattgcctactatttaaaaattgtaacagtataaagtttggcacaccatcacttaactgacactcctaatttggggcaagaggactgtgccccacagtactcacctagttgtactgtttttctaagccacccaccctttacccagagaagcttcccagcacatgcagagtgtaggtcaaatttctccttttctcaagtccagttgcctattgtgattgacacagttcctcctcccttggtcattttcagagatgagatcattgcctcctgagtctctgacaacattttcccctgggtacagaggtattaggagggaaccagtcagttcagttctaatccacaaacagttattaagcagctttataacctttctaggggctaagagtgtgcgatctggattcagattacctggggttcaatctcagtgctgccatttaacaggatttgttaccttaggcaagttatttaatttaaattactttattgttaaaaggaagatgatgataagccctctctctcaaggttgtggtaagattgaaatgagataatctgtgcaaatgcttagcacagtgcctggtatatagtaagtgatcaataaacattagctactaataccactatttgcattctaaacaggtactatgctagattccttttttttttttttttttttttgagacagagtctttctctgtcaccccaggctggagtgcagtggcacaatcccggctcactgcaacctccacctcccaggttcaagcgattctcctacctcagcctcctgagaagctgagaccacaggtgtgcgccaccacacccagctaatttttgtatttttagtagagacggggtttcaccatgctggccaggatggtctcgatctcttgacctcatgatctgcctgtctcggcctcccaaagtgctgggattacaggtgtgagccaccacacccggccgctagatactttaagagccaaaaataaattttaaaacataagagacaacctctgtcatcaaggagctcatatgtaggcagagatactggttttcagcacaagtgatggaatattcaaataattcaaacagaaaataaaggtgtattttaaaagtgaccaatgaatgtaaagtccaagtaaaagtaatttgatgtaacgctctctctctgatttgcccacagcccagctagatctatttttatgagcacttttcaaagccactgaggctctgaaatactactccaaaagaaacatttgataaatggtagctatttgtgacttttgcaccaagatgtttgtgacatggaatgccagggaggtaggctccttttcctcagccaaataatttcacctccctcggcctcattttccttgtggttaaaatcagcaccttggggcacaggctctcagaggtcccttggcaatggcatcctatagctcaataaatgcttttttgacatcagtgtgactaccaactccaaacacaaagaggtccccagctctgcttcaaaacgctaagaactgtctggaggtcttccgtctgggttggggcccccgttaaagataccctatattacatgaatctgtcacagtattctcttgttgcttttcaaaaatatgatttcgcctgcaatgtatttgaacccacataacaatgagctgtatcataacaggatttttccataaccatgtcaaatgtagggcattgctccacttgaaacaggaaaactgcccgcccactgcagagttttcttcttaacatatgctatttagttaacgtcctttttcaagtgtgagcatttgaatcacactaggggctctaattcagaaaaaaaaacaagtctctacaattgctagcaaaccttctgagacagcatccagcttctgttccctaatattttctggttttttgtttttaaaaaattaggttttttgctctggccttagaggttgagaggcattatacaaacaaatttataaaattgctatatttacatagacagcagagaacttattttcaatatcatattattttcatgaatattattttcaatatcatggggggttttgtgtgaataaactacttttctcccgatgtttgggtttaagaattaactttcacttactcccaactaattttaacatcttgaaattatcagcagttcagacagacttttagcatactgactacattgtctgtctctcctacatccccttcttgtaggaactactcctccctgactccaggtaattttctagactgtcagtcatgtctctactttcccaactaaagggctggacccaggctgtccaatcagagtattccagaatcctgataacagcaatgatgggtactagaacaggcatttaactcaagcatggccaaccagaatccttcatggaggactgatatagatgctaggatacagaggaatatgccttttctctctaagacttagtaggccttcagctactggtgaccatctttgccacacatcagagagctggcctaagaatgatcataaccaaaagatggcaagagatgcgggagagtcgtggtgacctcatttgaaccactggatccacaaaaatctatcccatgcctaatgttagtccaacccttggacttcctagtaatgtgagcaactgtacttcttttttagtgtaagctagtctgagttgggtttctaccactaatactaaaaaagccctggctaatcttttcctgggttccagtaccatcttcacagttactagatgtgttatgttaggcaagctgttcactgccttagggcctcagcttcctcatccgtaaaatggggataatgatatttacgtcaaaggattgttatacagaatcaattagataatacacataacagaatgggagaaaatagtttcaaatcgtatacaggttgagtattccttatctgaaatgcttgggaccagaagtgtttcagatatttttttttatttctggaatgtttacatatacataatgagacaccttggggatggagcccaagactaaacacagaattcacttatgttacatataaaccttatacacatagcctgaaggtaatcttatactatatttttaatgattttgagcaggaaacaaagtttgtatacaatgaaatatcagaaagcaaaagtgtcagcatctcatgttggcattcaaaaagttttggatttgggagaatttcacatttgggattttcagattgggaatgctcaacttgtatttgataaaggcctagtattcaaaatatataaacttttgcaacccaacaataaagagataaataactaatttaaaagtggacaaaggggttaaatagacatttctccaaagatatacaagtggataataagcacatgaaaagatgctgaacatcactaaacattaggaaaatgcaaatcaaaaacacaatgaaatgccactttgcacccactaggatggctgtaataaaaaagatggaaattgacaagtattgtcaaggatgtgaagaaactggaacccaccacattgctggtaggaatgtaaaatggtggagtagctttgaaagacaatttggcaactcctcaaaaggttaaaccaagtgttatcatctgacccagcaactgcttactattgtggactgaatgcatgtgtcccacccaaattcacatgttgaaatcctaacccaatgtgatggtattacaacgtgacacttttgagaggtaattaagtcatgagggtggagccctcatgaatgggaacagtgccttataaaagagaccccaggccgggcacagtggctcacgcctgtaatcccagcactttgggaggctgaggtggggagatcacctgagatcaggagttcaagaccagcctggccatcatggcaaaaccccgtctctaccaaaaatacaaaaaattacccaagcatggtggcgcacacatataatcctagctactcaggaggctgaggcaggagaatagcttgaacccaggaggcggaggttgcagtcagctgagatcacaccgttgcattccagcctggggggtgacagagcaagaccccatctcaaaaacaaacaaacaaacaaaaaaaacagagagcagctctctagctatttttcagccatataaggacacaatgagaggtcagcagcctgcaagggaagagggcctcaccagaatccaaccatgctggtaccctgatctcagacttccagctttcagaactgagagaaatacatttgttgtttgtaagccatccagtctagggtaatttgttatagcagcccaaactgactaagacactcctaggtatatacacaagagaaatgaaaacatatgtgcacataaaaccttgtacaccaatgttcacagcagcatcattcttaacattcaaaaaaatggaaacagctcaaacgttcatgaacaaacaaatggataaacaaaatgtggtatatccatacaatggaatattattcagccataaagagtaataaagtactggcacatgctacaacatggatgaaacttggaaacattatgctaagtcaaaagtcagatacaaaagaccacatactgtatgataccttaaaggtccagactaggcaaatctatagagacagaaagcagattagtggttatcaggggctgtgggggaagtggtaatgtgcaatgactaccagtgggtacagggtttcttgtgaggagtgacaaaaatgttctggaaatagacaatggtgatagttctatcattttgtgaatacactaaaaaccactgaattgtatatcttaaaagtgcaaattttatatgaattatctcaattttaaaataaccactatggtggtgaagatggaaggcataccttacctgttaataacaactagaatgacgatgatttagtatctactatatacaaggcaatttatttatgattttctttaaccctcactgcaaccctacaaagtagctattattctcctcatgtttaatagataggaaattgagactcagagaggttaagtgctagacctagggtgctgaaatgagtaagtggtagagttaagattcaaacagaagtctatctaatttcaaagttcaagccctttgcactaaaccgcactctctgtacaaatggtactctgctgatgtggcaggactaccagttatgtacctgctatgtagtccccgtttcttcactaacagagccccagtttgattcggggcagcaatgtgtttagctaaaagactcatcttccagcctcccttacagctaaggtggctatatggctaaatctagccagtgagatgtaagcagaaatgctatgtaggagttttggtaaagtgccttaaaaagggctaacacagctggaagaggactcctgttatccttcccttcttattgcatcttgctgcctactgtaatgtggttgtgacggctgacactccagcaaccatttgggatcctaaagcaatatgataaagagagtagaaccagggaaacagaaaaggcttgggctcctgataaccatggaggcactgactagctttgaactacctccagacttctctggtcagagagggaaaacaaacaaacaaacataattgctaatgttatttgggtttttgtttgtacagagttgaaatctaatcctaatttatataatgggcccatgaaaatgctgaaccaactaagaatatatgaaaacggcttatctcagaagtggtcaaatgagaagcattctaccagagtcattttcccaactagtcctctgtgtttgggattgtatatttaagaggcttagggatcctactgaattcttctgaagacatgcaacaggcctattttgtggcattatagaatcactgaaaagactggtctcaattcaccaagtacaggcattacattttataagcacttaaatttcatctcagaaattgtttcagagatacagtcacagaggagccaacaggctcccacagaatggatttctgaagaagcaaatttatttacacaacccttgcacaatttggctaagggagaggagacaaggcagattccacacaggaaggaagatgataaagctcaaagacttctttgctttaaaatcaatgttctgcccaatctctccagagcaatcatttaaaattccacaataatgttccctgccaaagagacaaacagcaatgggcttgccacagctgaaacagaaccccaggtttgctgttaatttgtttacataaaatagatgtgatacctaccagtgtattatctataccccaacagcaggttgatacagtactgtttggtaaagagtggcttttctttggttttccttctttctcatcagggttctttagaattcaagccacaatgacataagtgaggatgaaacatttgcaggaagaaaagatttttccacagtttttttctgtagcttgatatatctaattttgtatgcactatggatggctagagctggtaacccaaatattccttatgagggcaaaaattctggttttattttctgttacaggctgttgcctgagagagaattcagattgaaatgtattacagtcctttctccaggacttggctggaatttttaccccactctttccttttctgagagagcacactcatgcatatggacacatggacacatacacagacatatagacacacatacacagacacacacgcatacacaaatacacaggcatatacacacacagacatacacacatacgcacagacatacacagacacagacacacatacacacagacacacacacacatacacacatacagacccacacacagacacagacataagcacacacagacacccccccacacacacagaaatacatatacacacacacacacacacacacacacacacacacacacagagtctcatcttttctggaaaacaagagccagaaaaaaaaaaaaaccatgtaaatctctagacagacacattcattatgaatggcttttttttgcatacaaaacctatggattttaatcacaggtgcaccctctgagctttcacttgctcccattttctcttaccatactcaaaattctaacaagtttggtgagctagtttttagaccttcaacaaactgaacacagcagttatgctgggaatagtgaaaaggggctacaaggaagggaggaaaatgtaccaccacaaactagaaatttactaatacaccattccacaaaaaataaattctaaatacatgggcctgctaattagtgaaaaacactctactcaaccgatcccaacctcaaataagtgatattcaaaataataaacttggccaggtgcagtggctcacgcctgttatcccagcactttgggaggccaaggagggtggatcacctgagtttgggagtttgagaccagcctggccaacatggtgaaaccctgtccctacaaaaaatacaaaaacagccaggcatggtggcatgcacctgtaatccagctacttgggaggctgaggcaggagaattgcttgaacccaggaggcagaggttgcagtgagccgagatcgtgccactgcactccagcctgggtgacagagtgagatggagtctccagaaaaaaaaaaaaaaaaaaaaaagataaacctgtgtaataaaaaaaggttttaggcatgatgctatattcaagataccatgctggatgcagatctttataagagtttccaatcaaatcagcaaagataatataaaattaaaaaatatttggtgctcaaaggccttggagaaagtgtaactccctttaaaaaaaaaaaaaaaaaaaaaagcagccatgtccaagctaagcacagaacttagaagtcaaaagacctgcaatcaaatccttgccctactatttacagattgcatgacattgggcaaaagaatcaacttagacatactttcctcatctctaaaatgaggctaatgacagcaacttcagaggctgttataaacattaaataagatatgtgagagtacaacatatgtagcccataaatgttctttcaatccaaagaactgagattttactacgtatgtgaatcttcattgttttccatgaagctaatactaaaaatattatttctctgatgatgttaattaaaataaaaggatagggctgggaccagtggctcacacctgtaattccagcaccttgggagtccaaggcaggaggattgcttgagcccaaaagttcaagactaggccgggcgcggtggcgcacgcctgtaatcccagcactttgggaggccgaggcatttagttagggtcaagctttggtctaggtggctatattattttgtataattgctttttaacaagcttacatacttgtcgactttaataaaatgcaagttttgcccagctcagcgaactggcatcatcatcacttgcttcccgatggggaagcagcacagatgttaaagttgcgctgagcaagtgtgtctgaatcctgacctgtaccatggttgcagcttccacaggaggtgcccaacctcctagtcctggaaaaggtcaggagcccagtgcatccagcttcttttcacacaaagaggataacagagctgcaatgatttatcccttaaggatagtggtgtcgctgttcacagagcccccaaacacaagacatccaagactacctccaaggtaacatgtgaaagaggattccacaaaaagaatcatttgtgggcccccttcaggaatctgcctcttagcaaagtcagctttgggatcttagcctaactggactcatcactggctgcctcacctcgtccacttgcacatttatggctccggtttcctaactgctccatattgccactctcagcctggggctacttaagacagctgccttccctggtgggcacttggggatcagcaggcgcaaagaacctaggccagtgtcagggatggtttatggttattgtcttgtgcttagtcgcagggctctaaacccttggatcccccaggcgttaggaggataatgcgccctccctggttaatattctattggccactgcaggaatgggccatggagagtgagaccctggagaactgctgggaagagaggcccaaggggtctggctatggttaggggtgggggagcagcagaggaaaaaaaaaaagtaatgcaagcaaaatgagctgggcatagtggctcatgcctgtaatcccagcaattggagaggctgaggctgaaggactgcttgagcccaggagttcgaggttacagtgagctatgattgtgccactgctctccagtataagttggactctcgagggaaaaaaaaaaaaaggtctcctccctctggtttcactggaaagtgctttgaaatgtgttaatagaaagtttaggcaagtgaagtcctaccagcaagaaatggagggcaaagaagggagttcccatgactgcccacctgccttcactcaacctctactcctttgtttttttaaatctcctttaattcttacactatcctgtgagtggcataagatgttccccaccttatgcacaaggaaattgaggcacagagaggttaaatactaaaaagcatgatttcaaagccaggactgttttctacatcagctgtctacagccatacctttgctgatgtgcctgagaaatgaataataaacaggaaaacatacatttccatgtgatctgatgtcctgaggagtagtggggaaggcggggagttaatttacctctacccctgcctcttcagagacataaatacacattggcacgccatacacaaattaacaacaacaacaaaaagacataatcaatttggaattagagcttccaggaaatgtgggctcccagatgcacatactacagtaattcaggttgtttctctcctctctctctggttgggagctattctgatactttccatttggaagcacagatagggcctcctaaccacaaggcgtggagatgtggtcacaaggctgggctgggtgctccaccctgaatgccagagcatcctgctgggtccacacagccagggcctggtggaatccgcatccaggctgcttttctttcctttatctcaggaattcaggcaaaggctataggacaaggcccagtcatctcagtaattgtggctgtatgcagctggagcaagaagagcatggcatttatacttgcttccttaaaaacaaaacaaaaaggcctggcacggtggctcacgcctgtaatcccaacactttgggaggccgaggtgggtggatcatgaggtcaggagtgccagaccagcctggccaacatggtgaaaccccgtcgctactaaaaatacaaaaattagctggccatgatggcgcgtgcctgtagtcccagctactcgggaggctgaggcaagagaatcgcttgaaccagggagtcaggggttgcagtgagccaagattgcgccacagcactccagcctggcaacagagcaagactctgtctcaaaataaataaataaataaataaaataaattagctgggtgtggtggcaggcgcttgtaatcccacatacttgggaggctgaggcaggagaatcgtttgaagccgggaggcagaggttgcggtgagatgagatcgcaccattgcactccagcctcagcaacaagagcaaaactccatctcaaaaaaaaaaaaaaaaaaaaaaaaaaagtcttgctctccagtttcacatccaagttgaaatggggcaagagatgtgaaaagttttgcgagaaccacagaaaagaatcagatcatctcagagttgaatggactttgccatcatcttccccatgacaaacctcacaaatagcatggacagacaaacacacatacatcacttagaattcctgagcccaggaatggaaaaccaaatatcatatgttctcactcaaaagtgggagctaagctatgaggatgcacaggcataggaaggatacagtgaactttggggactcagggggaaagggtaggaagggggtgaggaataaaagactacaaattgggttcagtgtatactgctcacacaaggtgatgggtgcaccaaaagctcacaaatcaccactaaataccttattcaagtaaccaaacaccacctgttccccaaaaattaaattaaaaaaaaagaattcctgagaccatgtgtgatcgacaagcagacattgcagaaggggtgttttgtactgaagatcagtcccttgttgtttattcatttgacacgcactgaccaagcgcctcctgcctgctggcctctgtgctgagtaccgggatgtaaacgtgagcaatacagggccccagctctcaaggagcctatggtcaatcagagtatgcagatggcctgccaggcccactctgtaccctccttctcctgctgacctgctccagacacatctcagggctcctccaccctctggcttctacctggattcaggcaaaggcatgtggtaaaatgcagccagcagaaagtcagaggaggggagtgctcccctgctctccaggctccagccctcccggctgtgtctcagggtgctctccacacagcctctctggctcctgcttcccagaggcctcctctctctcaccccttcagacctttgaggatctgggtgcccgactaatctctatggtccccctgcccactgcccacacttctctcttattaaactctcttcggattaccctatttccagtgtgctgtctgtttcctcctgggaccctgactgatacagggagacagccatgtaaacagacagttacaacataatgcagaacagtaaaagataatgttgtttcccagtgaggtaaaagagctctggaatctgattgcttgggttgtacatccttgctctactactgactatctctgttaacctcttaatcctcagtttgcacttttgaaatatgcggttaatagtagtgcctacttaatagggtggccatgaggattaaacgagagtgcctcaatgctgacaaatattagcagggattcctatatagttaatggtgcaattcctttaataaagcaagtgactgatgaatgatggaagcactaaaagaaatagatactgggacacagaagaagggacaaggcaatggtaaagaggaaatcaggaaggacttcacggcgaaggtgacactgagctgcctcctgaaggaggttaactagcaggatggctggcaaaggatggtccaggcacgagtacagcaggtgcaagtgcacggaggcttgacacgcacatagatgtggagtggtgcaaatagctcagtgcaatgaaaacaaataacacgtgcagggagggattggagctgaggtcagacgggtaggcaagggtggccgaggaagaccttggatgtcatgtcaaggaatttggttgttgctttaaaagtgagggagagtttctaagacggcaatggacacgaacagttttgatgctgagaaggttcagtctggctgcaatgttgggcctgccctgggcaccgcatgaacacacagtaggtgccctgcagatgtctgtcaaatgcatattagcagttctagacagcaagatctgtcacctccctacttccttccaataaatgtgcacacatataacatgccatgatctgggcaactcacagtcacaggcctttccacatgttttctcatctgatctcattaatattatgagatcattgtggtatcataaaaaatagatttggtctttgtccttgacttctggcacagaactcttgcagcctcctgagtggtaagagtgtcttctgtacgctaatgagacggccaaaaagatgtctgggggaagaagaaggactaaagatagagctcaatcaccaatggtcaatgatctaatcaatcatgcctatgtaatgaaacctccataaaaacccctaaaccacagagatcaaggagcttctagtgggtgagcacagccatgttccgggaaggtggcacgtcccgagagggcatggagactgtaccaccgccccctcccccatacctggccctagcatcgcttctattgggctgtccctgagttgtatcctttataataaaccagtaatagtaagtattttcctgagttctgacgagatcaagcgtgttcagggtggtatggctgtagatgtattttcctgagttctgtgagttctagccaatcatcacacttgagaaggaaattgtggaaacctctcaatttatagctggttggtcagacacacgcagcctctgggaattgtgactggcatctgaagtgggagctgttctatgggactgagcccacagaattgtgggggttgccctaattccagacagttagggtcagaattaaattcagttgttgaacatgtagttcgggtaggaaaattggagaattgcttggtatagagaaaaccccaaacatttggagtcagaagtggtgtcagaaagaagacattgcacctggaaacactctacttcaccagagatgctggacgctgcctgtgccattcctgctgagacactccccgggccctactgccacagtgacacaagaggccagtgctcatcagggtggctctgccctcactaactcagtggctgattcaactgtccctctgggtgtggcagctagaggcactagggaccagccagacaccacgccctgagcctggcacactcatgtcactgctccttgtcctcaggctcaaggtctagaggctgcaggagactggccaggatccccctgcgacctcaccctactccccacccctgacagtgggcagctagcctgcaccagacatgtgctggagggacaggccctctcctcctactaagcacctacctgttgggcaccccaggtctcaggttgggttcccccagaagcccagcctggaaggaggatctgagtacaaggagtctatttgggaagtgatcccaactagatgaatggggaaataaaacagcggcagaaaggaagccaacaatgggtgtactgcagagcaggttaccactgaaggtgaccttcgggagatgctagagaacacacctcagagctgtgcacctgagaagcaggatgatggagtgtgtattctccaactctgctccttccttggctgagggctgctcctggggagtgaactcccagcacttctgacctgccctgcatgcagcctgagcatgccaaagaaaccctcaggagcagcagcctgagggtttgcagggtgcagggtgcagggaaccagggtgcgccaaggggacccagggggagcaccaatgtggtgcctgaggactccaccaaccggctggggtcactgtcctcaaggaggagcacagacaagtcaagaggtgactataacccatgaaggtaaaagcaatggctgaaggtgcttgaagggcagtgctggccaacagaaatataacccagtgcaacccatgcatggagtttcaaattgtcagcagccacaggaaaaaagttaaaaggaacacatgaaattaatttaatttttttagagacagggtctcactgtgtcatgcaggctgacgtgcagtcatgagcttattgcagcctcaacctcctgggctcaagtgatctttcgcctcagattcctgagtagctgggagtacagttgcgcaccactacacctggctactttatttatttatttattgagacagggtctctctctcttgtccaggctggagtgcagtggcgtgatcctggctcactgaaacctcgcctcccgggttcaagtgactctcccacttcagcctcccaggtagctgggactacaggtatgcaataccacacctggctaatttttgtatttttttggtagacatgggattttgccatgtcgtccaggctggtcttgaactccggacctcaagtgatccacctgcctcagcctcccaaagtgttgggattacagggatgagccactgcgctcagccccagctactttttaaatatcttttgtagagaggaggtctcactgtgttgcgcaggttggtcttaaactcctggtctcaagcagtcctccaccttggcctcccaaagggctgggattacagctatgagccaccttgcctggcccaattttaataacatatgtcatttaacccaatatattcaaaatactatcatttcaacatggattgaaagaaaaattattaatgagacagagtttttcatacaaagtctttgaaaacatatattttagacttataggacatctccattcagactagccatattttaagttcttagtagctacttgaagtggctactgtattagatgacacagtttgagcaccaaaagagaatggagaattgtgcacctaagggacaggatgacgcctggcttggagaatgcgtcctccaagctagaaaagaatcactacggtggcttctcaaggcacttagaataaaatctactcccatgacttagtctaaaggccttatatgaccaggccactgtccatctccctgacctcactttccaaacctttgtcctctcttctcactacagccctgctttttgtcatttctggaacacacccccctgagggcctttgcacgtgctgttcccctcagctggaatgccctgcacgcaggcctctgcatgcttgttccttgtcactctccaggtcttattccacagggtccctccttcctgaccactctcctcccaccctaatccccatctcttgttctccctttacccgtgtttattttcttaaggtacacaccatcagaaattaccttgttcaggccgagcatggtggctcaagcctgtaatcccagcactttgggaggccgaggcgggcagatcacgaggtcaggagatcaagaccatcctggctaacacggtgaaaccccgtctctactaaaaatataaaaaattagctgggcgtggtggcaggcgcctgtagtcccagctactcgggaggctgaggcaggagaatggtgtgaacccaggaggcggagcttgcagtgagccgagattgcgccactgcactccagcatgagtgacagagcgagattctgtctcaaaaaaaaaaaaaaaaaaaaaaaagaaattaaagatatcaccttgttcattaatattatttattgattttattgtctctcccactgtccccgaatctccagcttctagaccaatgctcagaaaaatacaaggtgcttaataaagatgtgttgaataagtaacaagtaactgctctgataaaggagaagcagaacagggaggaaggaccaaactcactctgacacaggcactgtcatgtattctcatttgtatccccagcacgcagtgctaccacccaatagatgcttgttcaaaaatggaaaatcaatcccagcactttgggaaactgaggtgggcggatcacttgaggccaggagtttgagaccagcctggccaacatggtgaaacctcatttctattaaaaatacaaaaattagctgggcatggcggcacacctgtaatcccagctactcaggaggctgaggcaggagaattgcttgaacatgggaggtggaggttgcagtgagctgagattgcgcaccactgcacttcaacctgggcgacagagcaagactgtctccaaaaaaaaagaaaagaaaagcaattaatgatagggaaatggggcgggaggggaggggtaaagctttcactttagccagagaaagcttcattgaagagttgggtctcagggatgcatgggagtgtgcagagtggataaggaagtcccagcagagagaacagcatgtgcaaaggcacagaggcacagaagagcatggtatatgttgctaatacacactgacggtcttccctctctcctggtttcccctctctcaaaacaagggcttgcaaggctctattcgatcttctgcctggaaatgacatcttaccttcaatctggtccccattccctttttgccaaacctccctgcaaggcaggcagactgctcacttctcagaattctcccccaaaggattccccaggctccagcccctgggaggagtgcttcctgcctggtagcatatgcctgcagccagtgagcgtgggtgcatgtccacatcccagactttttgtcgaaaataaattctttagagtggactacaagccaggagtctgtaagcacagaaccagtagagaccatcaaggggagaaagcctgcctgaaaatgaggccatctgagaggacagcagagcccagaggatcgactatgaaccaggcacagtgcagaggacctactatataccatgcaccaggtacagagtgctaagctctctcatgaactgccttgtttaatcttcactgcagtggcgtgtgggatctaatattattcccagatgaggaaacgagggtcacagggattcgtggcttgtccaaggccacacagcagggagatgttagatgggggataataatgtttattatgtttatgtttatcttaatgtttatgtatgtagtatcacaacagaagacagaggcctgaccacaccagtggcatccctggatccaggagagccctgaagccagcactagccttggatttttctttcttttctaccacttgacactaaaagacacctaactgatacagaagagcaccagcccatttctcccacagaggtgaaaggacttgcccatgtctccctccccagcagtctgggtgctgtaagaaggacccaggtctcctggctcctttccagaactggccacctgcccttcctacggttcatggtgaagactgccctttgtaacgcaggtcacactcacctgaactcttattctaatgcttgcataggggaagccagagtcctgtaggattaaatgtgctactgagatggcaagtcaacatcccacccttgcatggctccaggtcctctttataaccaaaggagattatggcaacccaaggacaagacgaccttctgagatgagatggaatgacctcaagttaccagcagggaagggcctcgctgattaaaataaagcacaaaccactttcccctccaccatgagagagacctgctagaaggggttattacaccttttcagatgcaacatcaaagctgtcattgctatgtaatttacagcctggtctgcatacaagcatccattctgtgttagtatgtgccaccctccccctcttcttactcagagaaccccactgctgggcagggggcagaaagtgggacattgggagtcagaagacgtgggattcagggaggatagtgtgtttttttcagacggagtctcactttgtctcccaagctggagtgcaatggcgctatcttggctcactgcaacctccccctcgccggttcaagtgattcttgagccttggcctcccgagtagctgggattacacaggcgcccgccaccatgcccggctaatgttttgtatttttagtagagatggggtttcaccatgttgcccaggctgatcttgaactcctgacctcaggtgatccactgatagtgtcttttattatctggggaatgttgggcaagttaccctgtcacacttcacatccctcaatgactccccattgtcctgtaatttgttctttcaacaaacatttactgactgtccactacatcctccaagctatgcactgtggtgagcaaggccgagatgacccccgccctcctggaagttataatctagtgagagaggcagagactgaacataaataaaagcgagacagtgtcccacgtacatacacacaccatggctctatggaggccggggcttgaggtccaaatattgtctttgatctaacaggatgagcttgaacaaggagctacaagaggggaatgggaaacatcacctccttctactacacagacatggcctggagcaatcccagaggcagaaggcacgttgctagctggtggtcgcttgaggttcatttaaaagagccaaggcaggccgggtgtggtggctcacgcctgtaatcccagcagtttgggaggctgaggtgggcggatcacttgaggtcaggagttccagaccagcctggccaacatggtgaaaccccgtctccactaaaataaataaataaataaaatagagccaaagcagaacagagacttgagtgtgtctaattccctcagccccagagttggtgaattaagagccaaccgtggggcaccttagagttagggcgggccttgtgaggcccaaagcctcctctccatggggagatgctgggtgctagagattcctttcccaattttgtggctcagcgcccgaggtgggggcgtgcccaagagagtctcagcttttccgacccgttacatggggatgttttctcagttaccaggtgggtaggaatctcaactggtctctgactctctcagagggaagtgattggtgaatggatgtttatttggtgtgtccacgagtggagggagagtcaggagcttctcttctgccatgttgctgacatcactctcccaacagaggctcttcaacagcccgctaaggaagctgattcgaacttgagctactaactctccctacatccagttacttggttagaggggtgggcatttgcggttttacttcccgagcacccagtactcctgccggtgaatgcatttcaaattcccactggggagtccccccacatcctttggttcctgtgggtctcactttcaacctctccctgaagtctgggaatgatcaggtgacatgggcttgtccaatcagaatagtccatggccttgtccacagtgactggtacagggctgaccacgtgacccaagatagaccaacgggaatcaatccagagattttgcaaaatcttctgggaagaagagctctctacctggtggggtctttaaaccggtggctttaggaccgatgcttctggaaaccatacttggagaacctgagaatacagccagtggaggagaaagcactagagaggaagggggcgagagattcagtggtgatgcagagaaaagggagagaccaaatctaggaatccagtcatttctggggccaggttttacccctggactcctctcttacctaagccagtacattcccttcttgcttaaggcaacctgaattgggtttctatcacccaaaactaaaactgtgctgaccacggaggtaacacgttccattgccgagtccatagcttgaagctctgcctgcccccgctcccacaccctgtcctgatgaaaaaacacagctgggcacagcaaattcagactgtggcctcagcccacagggctgtcgacacagggctaagcgctgcgctctccaccctgtagatacacaatcgccacgcgtcgctttactggtgaaaactccatttccagtctcctcttaccaaactcacattgtttgggaacttctgacaactgtacctcactctgcagaaacagttagaagcggactcacctctgccgtggtctgtggctcgggagtctaacagtcaattatctcgctgctgatgaaaaggcaggagcgatgaagacttagggagctcactgcagccagtcgtgctaatgacctgtctgcagtaactttgtaaacctccacttttaggttcatggctcagccaaaaactgtcactccacacttcagcttggcaagcatgtttgcaccgtggaagtgacgtccttgttgccgtggttaccaacgctcaagaaaacctttgtagctgtttataagcaccaaaccccaaatatttgcagagaacccctttcaggagcttgtggcactatggtgactcacaaaaagttatcccacgttttgttctttattttcttaaaaacagagaaaattgttctctcctcaaatctgtaaaatgcattagctcacagtttccattttaaaccgaaatcaaacctgctttcatatgaattgggtatccaaggctgctgtttttcttaagagaatctcagtaaatcctaacactctggatgacccaggaagaagaaatgtgaaaatggagaccaaggcccattaaaaaacccaggtccggcgaaagtggtggctcacacctgtaatcccggcatttggggaggccgaggtgggcagatcacttgagatcaggagtttgagaccaggctgggtaacatggcaaaacctcgtccctactcaaaatacaaaaattagctgagcatggtggcgctcgcctgtaatcccacttacttgggaggctgaggcaggagaatcacttggacccaggaggtggaggttgcaatgagccaagattacaccactgcactccagcctgggtgacagagtgagactccatcaagaaagaaaaaaaaaaaaaagcacaggtcccaaccaattttttaactacttgtatacatatatcaaaattgtctaatgtaccactacactccagcctggatgacagagcgagactccatctcagaaaaaaaaaaaaaaagcccaagtcccaaccaactttttaaccacttgtatatatatatgaaaattgtctagtccatgaaaggattctacaaataacaggcctagaattggtattttatgctcatggttgacttagcagcagccattgattttatttcaacaacaatacatatttactgaacatctatgtaccagactctgtgcctggcactggagtaactttagcagatgagcagccatcagtgaccttgtccattaggagcttatagtctggtgggggtggcagacatacacaagagaacaaacaattccagattgttacaactgctaggaagaaaacatacggggagcaaccaaagagaataaaggctagagtggctaggaagatctgtctgaggacatagcatttaagctgagacttcaggatgtgacgaccatggagtgggggacaggaggtacagggacaaggccctggaggcagaagaagagcatgaagcagggtcctgagacaggatagcacttgctgagtgtgaggaacagaacggaggccaatgtgctgaagcctcttggggaaacggggtggaggcagaggagggtacagagataggcaggggctagatcatgctagtctttgtaggccacggtaagaaatctgaatttcattctaagtaaaatgggcaggggtcttggagatcagcggtggctgtaagcaggggtgcagcatgagctgcaagaggagtgaggagaataatccatgttggacatattaagtttgagaggcctgctagacttccaaatggggatattaattaggcatttcagatcatcaagtctggaactcagaggacagattcagctggagataaaatttgtaagcatataatataatttgcatgtctgtataatttgcatgcagacatcttcaaaaatatttagaggtaagttggagcaaggggtgcccaactgagagactgagagggtagagtcacaagaagaaatccaagccggcttggtgtcatagaagccaaaagaaaaccgtgtttttagaggaagggagtgatcaactgggtcagatgattcgcagaagctgagttgacttacagattaattccaaagctttgagatttagagctagggcttgggggaggggatgaaaggatcatcttaacaggctttccttagagcctggggataatatagtagcacacggagtaaaagtgaaaactgcaggctccagggccagactccctgcagccaagttccacttctgccactgaccagcaatgtggccttaaataattttccaaacctctgtgagctttagtttgtctttacaatggaaataacaatactatctactcacaggattgttgtaaggattgaatgagttaataaacagcaagtgcttagaagaaagggcctggctcacgttaaatgctctgtgagcattagctattagtattgttgttgctgctgttgttgttgttacaataatgaatacttagtgccaagtgctgggttttacatgtattgtctcaggtagaagctactgttatacccattttgcagataaggaaacttgcctagcaccacccagtaagctctagggtggagactgccttcctgccaggtcagacagcctgtttttaatcactactctgcagttccgccatgtgatgccaagatggctggttaaagtccaggacaagggaaaaaatggctgactaatgcactaattgtgtttctgcttcaacctgcatttccagaggtgcctgttggtctgtaattggttctggcatgtttataggtattacaaaaccaaatcttattttgcatttcacaggatttaagatgaataaagtgatgtggttgtgctaggttagagttgtacaaattatactccaagaaaccccagttccttccccagagagggtagagtgtgatcccctaacgtgtataaagttctggtaccagccagaactacctaagctggaacaactctactctctgttctatacactgagctctttagctttctttttatttatttatttttttcctgagacagggtctccttccgttgcctaggctggagtgcagtggcacagtcacggctcactgcggcctcaactttccaggctcaagcaatccttccacctcagcctcccaactacctgggactataggtgtgtgctactatgcccagctaaatttttttttcgtagagacagggtcccattatgttgcccaggctttaagctttcatttgaagaaaatattctgaggatacaaaagcttgaaaaccacaagacttggcatttctcaaactacgtctgcatcagaatcacctgtggtggttgttaaaatgcaggttccttgaccctactacaacttaaagaattagaaacactaaagggagggcctgagaatctgatttttaacagctccccaggtgacccacatgcatattcaagcatgagaaccaggaaagaatgctcactattacctcgctttacctctctgtctcacacagtagccactacctatagctaacttcaatttaaacataaattccctaaaattatatgaactttataagtttctcagttgtacgaagcacattttaagtgctcaaaagccacatgtggcagacacagaatatttccatttcatagaaagttctactggaaagtctacaagtcccttccagcctaaacaatctaggaatctcagactgcctgaatgatgtactcatgtgttttatactaaggcaccaaactcagtcaagatttcccggaatcttcaactgtatttaaggcataatatgctattaggaatatatgattacacctaccatactggactgaaattacctgttagatatctatttcccctgacatactctgagtgccgtgaaggcaggtaccatgcatgtattatttaggtctgtattctcagtgcctagggcttaaataaatgcttggagactgtttaattgggccacacaacctaagtgaaatacaaagctgaaaatggaatgtcctcgctaaaggcattcaccagttacaagcattcatacctactaggatggctactatcacaaaaacagaaaataacaagtgttggtgacgatatggagacatgggaactcttgtgcactattggtgggaatgtaaactggtacagaatgtaaaatggaaaacagcctggctgttcctcaaaaaagtaaacatggaattattgtataatccagcaattccacttctgggtatatatcccccgcccccccaaaattgaaagcaggatctggagctatttgtatacccatattcatagcagcataattcataacaaccaaaaggtagaagcaaacacgtattcatccacggatgactggataaacaaaatatgatatgtacatacaatggaatgttatttagcctcaaaaatgaaggaaattttgatacatggtataataaggatgaaccttgaggacattatgttaagtaaggcagtaacaaaaagacaaatattgtatgattccacttataaaagatacctagagtagtcaaattcatacagacagaaagtagaatggttatttccagggatgggaagggagagggaagagaaggagttgtcatttgatgggtacagaatttcaattttgcaagatgaaaagaattctggagatggatttcgcggcaatggttgcacaacaatgtgaacatacttaatgccactgaattgttcttaaaaacagttaacaatagtaatttttatgttatgcatacttcaccacaattaaaatattttaaaataaagattttttaaaaagcattcactactaccaaccagagaaaatatatcagtcctcatggctttgagaaaatagctttggaaaaactttggttctcaatctatcctgctgcacctaggcaggtactaggggacaggagaggtcaatgccaaggtgagacatgcaggcactatcacagggctgaccaatgcatgcatggttcccgccttcaaggcactcagagtatgtcagtggcaatagatatctaacaggtcatttcagtccaatacagtaaatgtaataatgtattcttagatagcacattatacctttttagagagagctcctgtgacaatcccaggccagagggaccccctcctgggttctctcaaacaggaagcactcacagtcctcacacatggtcccctaccaggctgatcaccagaacccctggaaaggcttcaccctgtgggttctgattccacatctagtggtacaacaaagaccatctttatttttgcaaagttgtgcagggggagccagacctgggagcgcctaatctatagcacttacgttctgcctcatgccactgcttgtcccatcttctcatctggtttgcagacttcttgaggggaaagactgtaacttatatatcaaccttgagagtcaaaatcatttgtggaatagtttttaagactgcagatgcctgggactcaccacacatctactgaatcagcatctctaagcatctgttttttaaaaagcccccaaaagggactctcatacacactcctaaagggagacctgctgccttagagactatcagagtgcttgatacagagaagctgtgcaatgtttgctgacagacaaaaggaagtccctttgaataagacatctaacagggaaaagggatgtgcattcatctgtgttacttattctaatctttttctatgaatattctgcacatggtttagaccacatgataaataactaacaataacaattagtatttagtaagcacctaatatgtgccaagtactattcatgtgttttagaggtactatcccatttaattctcaaaacaatcgtatgtatgaggaaagtactgttatcatctccattttatagataaggaagctgagtgtctcagtccatttgtcctgctctaatggaataactgaagctgggtaattaataaagaaaagaggtttatttggctcttggttctgcaggttgcacaagaagccagcacctgcttctgtgagggcctcaggttgcttcaactcgtggcagaaggggaaggggagccagcatgtgcagagatcagatggtgagagaaggaggtgggggaggggctgggatcttttaaacaaacagttgtcacgggaactaacagagtgagaactcattcatgagggatccgcctccatgacccaaacatttcccatcaggccccaccttcaaaattggggatcacatttcaacatgaggtttagaggggtcaaatatccaaaccatggcaccgaggcacacagaaattaagtcacttcctcaaaaataaaccttttttttaacatgacagttatattatgagtgttctcataacttatcttctttttaatggctgcattattttaccctaatttgtttttcatccttctgcccctaatttgttaacccactgctcattgtagagcaggattttatcttgtttgtagcggtttaccattttaaatgatgctccaatggatatctttgtgcaagggctgtttgccatattcctgaaaaacttgccttaggaaaatcatgaggaaatgttctgatggtgaacagtgctaaacagtgagcatgagtctttactgaggggaatgtgctgaatgggccagggaagcccttctccctggaaggtattaaaagtcttggaatactcccacaaacaagcagcaaacatttactgtgggcctggtactcttttaaacatttgatcccacctggccctcacaaagactcctaggaaggccaagcacagtggctcatgcctgtagtcccagcactttgggaggccaaggcgggcagatcacttgaggtcaggagttcaagaacagcctgaccaacatggtgaaaccccatctccactaaaaatacaaaaattagccaggcatggtggcacacacctgtaatcccagctgctcgggaggctgaggcatgagaatcacttgaacccaggaggcagagattgcagtgggccaagatctcaccactgcactccagactgggtgacagagcgagactctgtgttgcgggaagtcagggaccccaaacagagggaccagctgaagccgtggcagaagaacataaattgtgaagatttcatggacatttattagatccccaaattaatacttttataatttcttacatctgtctttactgtaatctctgaacataaattgtgaagatttcatggacacttatcacttccccaatcaatacccttgtgatttcctatgcctgtctttactttaatctcttaatctcatcattttcataagctgaggaggatgtatgtcaactcaggaccctgtgatgattgcattaactgcacaaattgtttgtagagcatgtgtgtttgaacaatatgaaatctgggcaccttgaaaaaagaacaggataacagcaatgttcagggaacaagagagataaccttaaactttgaccaccggtgagctgggcggaacagagccatatttctcttctttcaaaagcaaatgggagaaatatcgctgaattctttttctcagcaaggaacatccctgagaaagagaatgcgcccctgagggtaggtctctgaaatggcccccttgggtgtggccatcttctatggtcgagactgtagggatgaaataagccccagactcccatagcgctcccaggcttattaggacaggaaattcccgcctaataaattttggtcagaccggttgctctcaaacatgttatcaatgacaatggtgcccaaaactttattagcaattttaatgtcgtcccggtcctgtggtcctgtgatctcaccctgcctccatttgccttgtgatattctattaccttgtaaagtatgcgatctctgtgacccacaccctattcgtacactccctccccttttgaaaatccctaataaaaacttgctggttttgcggcttgtggggcatcacggaacctacctacatgtgatgtctccccaggacacccagctttaaaatttctctcttttgtactctgtctctttatttctcaacccggccaacgcttagggaaaacagaaaagaacctacgtgactatcaggggcaggttccctgataactctgtctcaaaacaaacaaacaaactcctaaggggtacagatgagatgcctggaggcacagagaggaggaaatgtatccaggctcacatgaccagcaaacagcagaaccaggagaggagcctggtttaaccactttacccaccaggcccagctttccaatcaaggtattctttccccatgactccctcatcaaccatcagcataagaagcaaaaactaaggacagtagcaagaaagagcatttcccatcaaccagggaccacacaagaatgtccctgccgcagcacaagaaaaacatccgtctcacttccctggcaagaaatctggaagcactcactcagagtaacacagagttcctgccctcaaggtgctcaccctttagatgctgagataaagtggaaagaaagggaaggcaacaacaaggcccaccatgcaccaggtactgtgggcgctttctaatattacatacgtttgacacgtcctcttgcaaaaagtggagatcttagccaccccctcatccatgaatgtggacttatttggaaatagggtctttgcagatataattaaggtggtgattaagatgaggtcacatgggagaagggcagtcccgcaatccagtatgactgctgtccttgtaagagagaagagaggcacacaggcagaatgccgcaggacaacacaggcaggaactggagtgatgaggctgcaagctgaggaacatcaacgactgctggtgacaccagacactacgaagaggcaaggaaggattctcccctacaggtttcagaggaagcacgacactgccaacacgttgatcttgaacttctggcctccaaactgtgagacaatacatttctttttttttttgagacagagtctcactctgtcacacaggctggagtgcagtgatgtgacctcggctcactgcaacctccacctcccaggttcaagcgattctcctgcctcagcctcccgaggggctgggattacaggcacccgccactacgcccagctaattttgtatttttagtagagatggggtttcactatgttagctaggctgatctcgaactcctgatcttaggtaatccgcccgcctccgtctcccaaagtgctgggattataggtgtgagccaccgcgcctggccatatttctgttgttttaagccaccaagtttgtggtactttgtcacagcagccctaggaaactaatggaacattttctagtcttttagctccatcaaagcagaagctgtttttgtttcccttgatatcctggcagcttgcacagaccctggcacttagtaggtcgtcagaaaagtgatcaaaaaataaagtatacatgtagtaaaaggaggaaccatgttttttatctctactaagagacttgagcaaattagatgctcaggaaacatttgtagaatgaatacgttttctaaaaacaaatgaaggataagctcaagaaggctttgccatgagtcttattcatgtatttccccaggtttgagtgtaggacctggcacacagtcgctgcttaataaattttaaaggcagggagggaaaaatgaagggagggaggaagacaagaccagcatcatcacttcccatctctcagtttagccataaccttccttcctttatgtatttaactgaagtatagtcaatgctgtgaaacaaccagttgaattttaaatagactcaattattttgaaaggattttcgcagcagaacttgaatactgtttttctaaaacacatttctttttcttttacatccagaaatcacaaggcttcctaacccttccaactatgttagcaatgcagagttgagaggtcagccttctgcattcagctccagggacacgtttcccgtccatgtgcagcatgcattcctgatccctgccctgcagccaaaaagggacatcagctgggctcagggaaattcaatttgggctgacagcctgtggcatgataatgacagggcgtctgcttgacatttggaaaggcaaaagagggaggaggagtcacagaggtttctcatgggcttggttgaggagggtctaaagtttaggtcacttcttttctacatatggagaaaaacctgaacataaggccaactgatttctactgctggctcagaattcagcattcaattccacttccatgtgctgcgctcctgtctcccttatggtatttggggtgaataaaggaaacgggtcttgttctttattcccttggacttgagttttcccagggatgacaaccgcattgctgtggactgtgattttattcattcattcattcattcacatatttatgagaattttgttgttgttgttgttaagaaagagtctagttctgttgcccagactggagtgcaatggcacgatctcagctcactgcaacctctgcctcccaggttcaagcaattctcatgcctcagcctcccaagcagctgggactacaggcgcccaccaccatacctggctaatttttgtatttttagtagagacagggtttcgccatgttggccaggctggtctcaaactcctggcctcaggtgatccgccagccttcgcctcccaaagtgctaggattacaggcatgagccaccatgcccagcccgtatatttattttaaataagaggtccctgtatacacgtcttcataagtgaagtctctgctcctgtgattcccttgtcttctactgaactcacaagggcgagcacttgcctaccccatggaacatcaggtaggttcacaactatgacagtgacaacaagacaagaaaagctgaccccttcttagtgccagttaagcaaaggatggggggaactgctttatatttcttgatgtagccctcctgtggtcagcttacccactgatgtgggaacttttcccccatcaaaggggttggttgagaagcacatctgtgttatttcagcagatgagcctgtggggctgggttagcttccatgcccctcctgtggccccagggcatcccatactgaacctaacctggtggctggtaatctgaatggtatttacctctttccttttcctctagataagaagccccatgagggcagggtcatgtctacagcatggacctttgtatcccaggcatcctagccaggttactggcacataagtaataagcagttatcaatacaagttagatgaatgaatcaatcagtcagtcagaggactaaaggtgctggccttgtgttacagctaagagcacaggctttggaatcaggcgagtgtaggtttcactcatgttccaccacttttcagctacatgacatgtttttattgacatataagatacatacacaaaattatctatgtcataagtgtgtcatgcaaggaacttttacactaatgaaacatcacccagatcaggaaacagcacattagcacaaccacagaaacctgccttatgcttccttcaagtcgctatcccctacccacccaagggtagaccatgaatggcatctgacaagttactatcctctctgactcttatcttctattgggaaaaatagtacttactatgctatgagtatacaatttaaaaataataatggtatagtagtaataatagtagaagagaagtagaagtagtcacaacagtagtagcagcagcagaagtgacagtagaagcagtagtggtaatattagtagaagcagcagtcatggtaagagtaaaagtattaatagtaataagtaacagaagtagcagtagtcatatcagaagtggcagtagcagtagtagtagaagtactagagagatactactagcaatagtagtagtcataatagctagaacttatatagcacttaccatgtaccaggcactgttccaagtgctttagcttaactcaactagtgctcaaaacaacccttgtaagtctataaaacaggagagaacaggaagaagccgaggcacagagaagttaagtagcttttcaacaaggtcacagaactacgaaaccatggatccagaatgcaaactccagcaggctggctgcagagcctatcctgtcagcacgatctttcaagaatgagtagtgtggaggaaaagatttgtcctccaatatctgctctcttcttctataacaataactctcaatttggtaagcacacagtcttgcagaataaagattacacttcccagccttctttgccgcaaaatgtagccagagaactaaattctggccagtagaatataagtaggaacaggaggtgcaacttccaggaaacatccttaaaggatgggacgtgcctttctctgtctcgttccttcctcctgctgttagatgtgatggctagagcagaagcagctaaaatggggctgtgaggtgaccttgggaatagaggttcacatggcaaacaaactagagaaaaagcccaggtctctcacagattgctgtagaaaatctgtgttacttgtacctgaacttttaggtaagagagacacttctctaagccaatgttcttttagattttatgtcattgtcagcaaaacctaattctaataatgcactgagttattgcaattataattaatatcacctgaaaagatacctgcaaaatgaatgccattttgtgctggactcttgacttaaaaaaagaaaaaaacaaaataaacatgactttgggtaatcctataatagaaaaattttgaaaataaaagtaaagcttcatttaccctggaaggcggtatcatgtctcgatcatatcaaaagcctctcaggttggcctctctgcctccagcctctcacttcatccacccattcaggacacatttgcttatctaatcatcctttaaaaactattttcaacctaaaaattgaagtaattacaatgccctatgtgcctactttatgtaaaacactttacattttttctaaactacacaaaaaaaatctgaaacataaatattacccctttttcatggataagaaaacagaagaaacagagaaagtcagtgtctttttttttttttttttttgagacagagtttcgctcttgttgcccaggctggagtagtacaatggcgcaatctcggctcaccaaaacctctgcctcgcgggttcaagagattctcctgcctcagcctcccaagtagctgggattacaggcatgtgccaccatgcccagctaattttgtcttttttagtacagacagagtttctccatgttgcttaggctggtctcgaactcccaacctcaggtgatccgcccacctcggcctcccaaagtgctgggattacaggcgtgagccatcgcgcctggccgaaagccggtgtcttgtgtgagatcacacagcaaatcagtgccagggccaggattcaaccaccccttctagcacccacacactttccactacgcggacttcttagaaaccctggccccaacaggtcaaccctgtgccagtcagtctgccagctttttaagattctcagactctacaagttttcccggcctagcttttcatggttcttcctgtccagtctaatttttatcatcctctaacacaaactttcatccactgaggccagactccttagactcttcatcatgtgtccctacaccaggcctcagtattcccagctgcaaaatggaataaatcatatctctacctctcccaagaggtaacgtggcataggaaaaaaaaaaaggccaggtgggcacggtggctcacgcctgtaatccagcactttgggaggccgaggcgggcagatcacgaggtcaggagatcaagaccatcctggctaacacggtgaaacccgtctctactaaaaaaaaatacaaaaaaattagctgggcgtgatggcaggcgcctgtagtcccagctacttgggaggctgaggcaggagaatggcgtgaagccgggaggcggagcttgcagtgagccgagatagcgccactgcgctccagcctgggcaacagagccagactccgtctcaaaaaaaaaaaaaaaaggcaagggtcctgcagtaagggaaaattgacttacatctagctgggcaagttctttacccgtaaaatgaatgtagaaattcttttttttctgagacgaagtctcattcttgacccccaggctggagtgcaacagtgtgatcttggcccactgcaacctctgcttccggggttcaagtgattctccctcctcagcctcccgagtagctgggattacaggcgcctgccaccacacccggctaattttttgtatttttagtagagatggggtttcaccatgttggccaggctggtctcgaactcctaacctgaggtgattctcccgcctcggcctcccaaagtgccaggattacaggcatgagccactgcacccaactgaatgtagaaattcttacttggcaggattgttgggaggagtaaatgaaattttattttattgtacttttaatttttatttttgagaaggagtctcactctgttgcccaggctggagtgcaatggtgcaatcttggctcactgcaacctttgcctcctgggttcaagcaattccactgcctcaacctcccgagtagctgagattacagtcacatgctaccacacccagctaatttttgtattttagtagagacaaggtttcgccatgttggtcaggctggtttcgagctcctgacctcaaatgatccacccacctcagcctcctaaagtgctgggattacagacgtgagccaccatgtccagcctgaaatgtttttaaagaacctaaaacacagtggactcctatagcaccttatagtgttgctggtgtcactgttgttgctactcttgacttcttataggcaccaccacccagacaactttccttataaataaaggcaatggataatgtgacagaaaacatagtaggcagtctacacctgtacaaatgctagagatctgttctccaataacaatcgtgcacacagtctctgttagattccagtgcttgtgtttgataaaattttgcatttcaactcccaagaagaatcccgctgtatctcccacgccgagttttctggacaggatgggctagagatcactcaccgattccatagtgaatctctcgacgaaaaactggagagcctggaggctgaagatctcatgtctcagccgtcacatcagaaaacgacctggatagggggcaggacaaaaaggggacaagagtcatccggtgaaactgggcagaagacattgtctcagaccaagatcggatttcatatggaggctgcacctttgtcaggaatgttcttgcaccacagagtggctgtccagaaatatgaaggaaactactatttcagcttcctatggtggggctgatacctccatcattgaatctctgtgcaagtaagtgctcaggaatccttctggcattctatttctagctctacgttggagagcaatttacaagtcattaacttctctagacctaggctcctaaacataaaattaaagtgtgctgatggatgcgacagacagacagacagacacctgcagctgggtgcccacgagaaagcaaaagtgttcacccggcaaaggaaaccagttgcaggaagaaggcagatatagaagaatatacatatttcaggacagcccctctgaacctgggagaggattttaattaattcatgcataccaaagcttaattaattgctgagtgcacagagcacaggaagtctgggataaaagatgttacataagggaacagcttcaatatttgcagaatagagggaaacagaggtggggatataaaaataaattgagccaagggacctccttggcttttatccagtgattcctagctcaatgtggcatctccatccagggcgaaaaaccgagagacatctcagttccaccatctccctcacccccatatccaatccatccccaattcatgtctactttacttcctaaagatctctccacttatctctccccacctccactggtccagctctggaccaagcctccatcattcttacctgggccactgcagctgcctcctaactgatctcccctcatcaccatttctccctctgaaatctagtcttccatgctgaaagcagaataatcttttgtggggtttttttttttttaatcttttattacagggaattgtgtacagacataaaaacagagaagtgtatcatataccccctgaacccaccagccagtctaatcacattaacccataatcatacccaccacatccaaaccctcaaccttcctgcccgtgcattattattttgaggaaatttccagtcatcttatcatttcagtcataaatattaccgcatggatttctaagataaggtctttggaaaaaaataacactgtaaaaccactaccataccttaaaaagatagcaataattccttgatatcatcaaatattcacacagtgttcaaattcctaatagtctcataaatgtcaaaaatggtgtctttaacaagtgtttttttttaaaaaacccagatccaaataagactgacacttaacaattgagtgatatgaagaatacaattttgaaaacacaaatttgattgtgtcatccctcaactctccaccactagcttaacatccctcaacagcttctcagtgctttagaataaaaatccaaatcactgaacatgttctgactcttgttcacctctctgaccttatcctgtctaccaggcacaatgctgtagccataagacattttctttttctttttctttttttttttttttttgtgagacagtttcactcgttgcccagactggagtgcagtggcgcgatcttggctcattgcaacctccacctcctgggttcaattgattctcctccctcagcctcccaagtagctgggattacaggtgtccgccaccacgcccagctacttttttgcatttttagtagagacagggtttcgccatgtcgagcaggctggtctcgaactcctgacctcaggtgatctgcccaccttggcctcccaaagtgctgggattacaggtgtgagcctctgtgcccggcccattggacattttcttagatcctggaacatgctgcagttgttccaccacaggtcctttgcccatgttgttctctctgtctggaaggcttcctctctcatcttcagtgcctaggtaactcctgtacttccttaaatattatattctcagagaaactctgcatcttcagattagatcatggaatttatctcagtttttaattatgtttcaacgtgaagactgattaatatctgctaattttcttcaattgtaagccatgtggatacaaagattgtgtttggatttgtttattggtgtatgttgcagcaccaactctacaatgcccggcacaacaatattaataaatatttgttggataaacgatcaaaccatttccttcaaacttagatgccaacagcaattgaatcttcctgagcactgaatcacaaatttaaattagatggggaactgacaagcttatcttaaaatgcatatggaaatgcaatggactcaggatagccaaaacaatcttgaaaatgaagaacaatgttggacttctatttcctgactttgaaagaaatcaggacagtgtggtactggcataaggataaacatatgctatccttcagaatcaaagatcatgatcttcctataatattgacctccagaacccaactttactaagcacacgcttatgaaaaataagtatctgttacttgcatacatagtcaatgcctctcccagcctgctcctcagtttattattcttttgctttccttgcttcacccaagtggagcagctgagttagtatggtagactgcatgagtcttcccagttcacttccaacatgactgtgaactacacatttctgccctttgtcatgggactttgtagtacttcccactagagtgaatggtgtttacttccctgtcccactggattctggactggatcactgacttgctgtagccaatggaatgtggctagaagtgacagtgtgctgttcccaagtctattcctcttgccctcttatgatgcaccacaaaaggaatatgtctccatagccgctgtctgttgctgccttttagtctgaactcagatcaaagacatgtggagcagatcccaatcaaccacaagtccggcatgaaccagccatgcaactagatcagccaaaccacaaccaacccatagatccttgagcatgaagatacatatctgctgtcaaacaagcctctgaaatcctgaggtttttgctactcagaaaaaactgcctaattcacatgggaatattaatttatgaacaccgagtatcaataaagccatgcacatagacagcacaagtatgatgaccactgacagctgttcttgcagaattcccacctccttggtgccagttggactcacacaacaatcctgcaagggagacactgggccagatttatagatgaaaaaatcataactcacaagatatgaaataacgtgtccaagacagtgtgtggcagaactaagatcctgacccgggtggtctaaaaaactccaagccaggcttcctctgcataaatcataaaagggtcttgcagatgctgccccatgagtctgtgatgtaccaacctacctccactcttgtcccattccttcagtgggtcttcatgagaggctgctggggtcggggggaaggccactgggcctaacatcaaaagttccagtcccaattccacccctatggagagcttcacccttgtcagcgagcctctttagccctcaggtttatgaaatgaggccactaatcccagcctggcctacgtcactagaccatcgtgaaccttcagagagatgaagtgtgaaagagctgtgtgaggtgtgacaccatagtcagttcacattctgctgccttgactctgaactaattcgaagtaggttagcagctacgtctatgtccgtacctcacccacggcacttggagacccatctgatgctctgagaatgattttttattcaaacagagattatttctttctagtcaagaaagtaatctaggttcatcagaaaaaatattaaggcataaaattaaaatcaattattatcccaatacctgaagataaatactgttcctatactagtcaagaaagtaatctaggttcatcagaaaaaatattaaggcataaaattaaaatcaattattatcccaatacctgaagataaatactgttcctatactaaggcgatttcatttctgggactcttttctttctgttggttttttgttgttgttgttgttaagggtaaaacaaagaatacatttcaattaccataattttcttagaagcagggaactaccctgtgccagggactgctcctgctgcctaaagacagagcaaagaacaaaagaaaagaaagttcatgatcttaaaggactaatattcattcattcattcattattcttaaattccataaacatgggtcacccacatccagtactgggcactggatgatgatgatgataatgatgatgacagcttccttgccagatcctgtactctaacagtatgacttattaaaagttggcccctagaacaaacacatctgggttagaatccagattatgaatctttgatgagttatttatcctttcatactttagttcttttttttttttttttgagacagagtctcgctgtgtcacccaggctggagtgctggagtgcagtggcgcgatctctgctcactgcaacctccgtcacccaggttcaagcgattctcctgcctcagcctcccaagtagctgggattacaggcatgtgccaccatgcccagctaattttttgtatttttagtagtgatggggtttcatcatgttgaccaggatgatctcgaactcctgacctcaggtgatccacctgccttggcctctcaaagtgctggggttacaggaatgagccactgtgcctgccctagttctctcatctttaaaattggatttcctgttctgtggaagctgtacttagaaaattagggacttaaaagaaaatagaccaaacttatttttatgatgctattcctcttaagctatctgaagcccaacttgtccagtccgagctgaaattccacctcttctaggaagctttctccaattttcccagcgcaacaatctgtccatttctgaactcttacagcacagctagtaaccataaggaaagtacctacctcatgcagtcatagcaagaattaataagagaacatgattaaagcactaagcaaaaaatggttggctccccgtaactgatgaatgcatgggatctagttgtggtggtagtgatattactgcctcgtttaatccccatacctatcctagaagaagctgaaactcagacattgaggaacgtgtccaaggttattgcttgggcacctcaggctcaatcccactaagggaccttctgagagactgtggagagcacatctcagaattgccccaccgaagggaaaggaatctggggcatttacctgccaccttccatccctaactgcccagacacaaccagggcatagtctcaggctgagatgcaggaagccctctgtgtgaatgggcactgtctgcagtgccttccggggagcactcaaagacatgagcaggggagcggcagcatctgtacatagacgctcaataaatatctgtcgaaggagtgagtgaacaatgtctgtcaacccccacggtcttctgtacaacctctcatttcccgctgccaccagcgacagaaagatttaaagcacctgcctgctaaagtgaaccagaattcattaccatcaagcatcagatttgttaccacccacgtttctgcttttccactgaaattctgttctacgacttacagtttgtcagtcaggacaggaattcctgatgccatgcaggaatcggggacataaatcatttggtacataaacccttctttattgccattcctcaaataggtgttttttattcaacagaagtgactccacgaatgttgggatttgtatccttttatagaggatgttataaactcttgagtcatctgcagctggttacagcttggacaattttttccccataatatcaaaccaagcacttttcctatttactgatgtaattctttcctgttctgtggaagctgtacttagaaaatcagggacctaaagaaaatagaccaaatatatttttgtgatacgattcctcttaagcgatcagaagcccaacttgtctagtcccagttgaaattccacctcttccaggaagctctctcaaactttcccagcccagtaatctatccacttgtgaactctaacagcactgctaataaccatagcaaccccttattgttgttttatgtgtcaacttgactgggctaaaggatgcccagatagctggtaaaacagcatttctggttgtgtctgtgagggtgtttctgcaagagattagcctttgaatcaggagactgagtaaggaagagtacccttcccaacgtgagtgggcatcatccaatccattgaaggcataatattaatagaacagaaagtagcaggaagggtgagtttgctctctgcttgagctgggacatgcatcttcttttttggacactggcgctcctggttctcagaacttcaaacatagactgggatttacaccatcagttcccctggtttttagaccttcgggctaggactgaattacaccactggctttcctggttgtccagcttccagatggcagatcagcctccataatcaattccacttattataagggtgagccaattccctataataaatatccccttacatatatcctataaattctgtttctctgaagaacccttttacatatcagaccccatcctaggcacattcattaaatcctacaaggaactttgcaaggaactgtgattgtctgaattttagataaggaaactgaggctcaccaaagttacataacatttcccaagtcatacagctggttagtggtggcagactcagaactcaaacttgaaagagctcgatttcaaagctcagaactttatctgctgtgctaagcaaggcactatggatcatgaccaaacacaccccatttggtatcatttcctgattgttcatagaggtaagtcaaatctcctctcctggctggatgtggtggctcatgcttgtaatcccagcactttgggaggccaaggcgggtggattacctgaggtcaggagttcgagaccagcctggccaacatggtgaaaccccatctctactaaaaatacaaaaattagccaggcatggtggcaggcgcctgtagtcccagctacttgggaggctggggcaggaaaatagcttgaacccagtaggcagaggttgtagtgagccgagattgcgccactgcactccagcctgggtgacagagtgagacggtgtctcaaaaaaaaaaacaaaaaacctcctctcctgtggtgattcttgaatgtaaatgctgagaccatttgaattggtcgtggggattttgtactaatcgctaggtctttcagtttccatatctgctggcaagcaacaagtcctgcctccctaccaaccctgatcagccctgatttaggcatctgtaacctcaggccaggtaactttggactcctgctatttttcctaatccctcttctccctggccagcatgcatgtgtttgagatgggcccttctgataactctatcttcccaggataatccaataggctacagttcagagagatacagaggagaccttgcagaagcccaccccaagaagaaagccaagaagggctgaggtattctccctgacaatgccgaggctgctggaccttagctttggctctgcccccaaccgcccgcctcatttgttgattcaaatgataacaatcaaagatggtttgggtctttcctctccaaagaagaggtcactgtgaaggacccacaacccaaaagaccagaaccactgtcttgctggattatacactcatgacaactgtgactgcatgtcttatagcctactctgagtatactgcaggcactgggcctgacagtgaggagggtgagttgagtaacacaaggtcattgcccatagagagctcacagtctggtggggcagggacaggtatagaaacagacaggatgaatggttgtcagtgatatcatctgggtgtgaacacaatgtcataggacctgccttccaaacatctcttaagtgcctactgcatgctattttccattggctacagcttcccatagtgagaattatcttctgggaaaatgcatctattcatccactaatatactgaagaaaaaatattaagctaaatatcaaggaagtattggttagcaaaatagacgtggtctctgcttaaggaataagaccttcgtcaaaaaacctcaccgacaacaagaaaaagggcacgtactggtaccataggacctacctactataagcgattaataaatcctcagcattttaaaaagttacatcctaagaattttgtgactcttagaataagtgaatgccagagaaacagcctcgggacccccaagaagagaacaacgaaataaacttgagagttctcaagtttattctatactcggagggaggctaggctcactaactagccacgcaatccaatcctcatgccagcaggagcaggctcaacccagtctgggccaccacaaattatacattttcttcagggttcccctgggaagaagtgcaagtgtggaatgtgaaatccaagggagcctagggtctgctgtgctgcccattgtgtgatcatatcttcaaggtcatttcaaacaatcttgaattcactctcagcgagtatgctgagcgcagagccatctgggcagctgccccctcatgctgcagcccagggctgggggaatttcccaagcacagcaaagaggagagcccttgggacagaaagacacattccaacacgggctctcccacctaatttctggctgatcttgagtgatgaaaaatcacttctgggaacctgtgtcatcttctttttctgttttttgagacagagtcttgctctgtcgcccaggctggagtgcagtgacgtaatctccgctcactgcaacctccgtctcccgggttcaagcaattctcctgcctcagcctcccaagtagctgggattacaggcacccaccaccatgtccagctaattttcgtattttgagtagagacggggttttgccatgttggcccaggctggtctcgaactcctgacctcaggtgatccacccaccttgggcccccaaattgctgggattacaggcatgagccactgggcccagccctgtgtcttcttctgaaaaatggagatttctgcagactatgatgatgcccacacacaatgccttgactctcacaggtcattacaggccaggtgcatcttactgcaagcaacacctgccactctgccccaagagcttgctctcagccaccaaggcacaggctcggagtgccaggaaatgaatgcttctagctgtggccttcagacaaggatgagtggaaatcaggaaacaatatcccagctccttgccccttggttctgacaacctgagaggtccccagaggaatgaaaccctagtttcctgcctgataacatgctattcgttggctccttctcttctctgtctcccttcctcattcctccacctgtgtttccttggatcacctcccaaagaaactatgcatgctccaatattttctcagtgctggcttcttggggaaaccaccctaagacagggatgatgatacttttaacagagtgttgttaggaggaaaaaaaggaagttgtataagtgtagaaatgccagcataaagcaggtgtacaatgaacaactgccagtattatgacagcccaaaactagaaatgacatctgcagcccaggggcctgactcagcggcttcccagcaaggccagcaccataggcatgttttatgtggctggaaatcctgttggtgtccactgaccactgtcccagtgacagagagaatacaaccaaggcctggaagtcaccttccaggagcagcaccccagtgtcccagcctccaccctgtccaaagaaaagggaaccaggatggaaaggggtctgcatggaaaggagtttactccctcgcaggaagcccccattacccagtgctcaccaggtaccacgcaggccctgtatgggtatcggccacatagcccctttcaatcacgctgagtcttcacccagcccagagcagtgagaggtacagctaggaatgtcatcccactttacagaggaaacaacagcccttacaggataaataacaattttaatagaataaataacaacaggtctgatagagtttggatctgtgtcccagtgcaaatttcatactgaattataatccccagtattggaggtggggcctggtgggaggtaactggatcatggaggtagatttctcattaatgattagccaccatccccttgttgctgtccttgccatagtgagtgagtgactttccgtgagatgtgtcgtttaaaactgtgttgcgccttgctctctctcttgctcctgcttgggccatgtgacgtgcctgttcccccttcaccttctaccatgattttaagttttttgaggccccccagaagccgagcagatgccagcatcatgcttcctgtacagcctgcagagccatgagccaattaaacctcttttctttataaattacccagtctccgatatttctttataacaatgcaagaatgacctaatacgagtctagcagaataaataacaatttcttttcttttcttcttttttttttttgaaatggagtcttgctttgtcacccagactagagtgcagtggtgcgatcctggctcactgcaacctccacgtcctgggttcaagtgattctcctgcctcagcctcctgagtagctgggattacaggcacatgccactacacctggctaattttttaatagagatgaggtttcacatgttggccaggctggcctcgaactcctgaccttaggtgatccacccacctcggcctcccaaagtgtgaggattacaggagtgagccactgtgcccagccacaatttttaaaaataacaaagctagcatatattgcatagttattatgtgtatctgacactaactacacaagcaataacttctttaaccttcataacaaacctaggcaacaggtattgctgtttgattttacagagaaggaaactgaggcaaatacaggatgagtatcttgccagagtttttacagctaataaatggaacctaggtctgtctgattacaaagacttatctttcctttaaatctcaccagcctttcagagcagggccagcctcaggagaggtctctgctgcatgtatttcccttctagttttagaactaaaaaaagatctttaacacactaacaagaccagcctcgctcgagctcattcctaacacttaggagtaggtccaattaacatcagcccacttgaccacactctttgtaattaccgtatttcctccattttatgatgaccacattttcacattttagcatttctgaaacaggacgtgtctcctatcaataaaatataatgtggcagaactattttctctcccaacactgctatgatatcaataatgcatcttgaaatcaaagacatctcagaatcaaaggaaataaagtatatctaagaaatgttcaaatctcatcaagataaagcccagatcaggccttagaagactgtaagtttgaaaaatgaggagcctgaatcatctccttcagacttccccaaaaatccatcaaagcatatctgtgcctgcataaagtttcaccccacacagcagcccactaccatctatctgtggctctgaaatctcatggaatccctatatatctgcatttttaatttaaaaaaaggagatcagttcctcacttgtcagtccacagataacatctaatgagtgccgattatgttgttaaaatatgaaatatatatttgactgcatcttctattttgccagattcattcattcattcattcattcattcattcatttatgtaacactccaacagttgcctatgaggagcccacccaagtgaggcattttcctctgctgtaaggcagacaggtgaatcgatgattgctggtacctgcaagaacagaagttgctataaagtagagaaaataatacagaggactggatagtgagtggcttcatgggggacatagtagcagcttctggttttgaggatgaacaggagtacaccagacagaaaggtaggaagagggaattctgaatggacagaacagtaggttcaaaggcacagtcttagaaagacctttcattggacgaatgtttgctgacccatctgccatgtccaaggcacaatgacgatacttccagaattttaagataataaatgtgtgttgtttcaagccattaagtctgtgcttccatctaaaaccttgttaccacctatacaaacaggcagatttgcatttacaaggttcttgacctgaaaggtgcagagaagcagaaggaaaaagccagggtttcagaattaaggggcaagagtttgagagtcctggctcttccctctaccagccttggacaagccaccttacctctctgaacctcagttttctcatctgtaaaactggcattaataatattaaactcaggtgcctgctgtgaatcaggccttgtgatttccatccagaaatacacacataactgatgcttctcttggccaattatttggccctctagcctcaaaatattgcaaatgtatcagccaaagtacatgatctatttaacaatgaaattcttttttcttgatatacgtgtcttatttatgagggtgggaatattgtttgttcacttctataactcttttttttttttttttgagacagggtcttcctctgttgcccagataggagtgcagtggcaagatcttggtccactgcaacttcacctcccgggttcaagcaattttcctgcctcagcgtcctaagtagccaggattatgggcatacgccaccacagcccagctaatttttgtacttttagtagagacaggatttcaccatattggtcaggctagtcacgaactcctgacctcaggtgatccccccaccttggcctcccaaagtgctgggattacaggcgtaagccactgtgcccggcacacttccataactcttaaaatgcctagtgcacagcaggtgctcaataaattatctgttgatgaatacattaacagaattagataaaaacaaataagggaagcatcaggaagacttctatatgcattgtcaaaatgggaaactggggatgccttttaaactacagggtaattcaggctgaggcagaaggatagcttgaggctaggagttcaagaccagcctaggcaatatagtgagacttcatctctaaaaaaatttaaaaactagtggggtgtggtggtatacacctatagtcccagctactctggaggctgaagcaggaggatcacttgagccctggagattgaggctgcaatgacctatgactgtgccactgcactccagtctgggcaacacagcaagacagcaagaccctgtctcttaaaaaaacaaaacaaaacaaaacaaaacagccaggtgtggtggctcaagcctgtaatcccagcactttgggaggctgaggctggtggatcacctgaggtcaggagttcaagaccagcctggccaacatggtgaaaccccatttctacgaaaaatacaaaaattagccgggcatggtggcaggtgcctgtaatcccacctactcgggaggcttaggcaggagaattgcttgaacccaggaggcggaggttgcagtgagccaagatcacactccagcctgggcaacaagagtgaaactccatctcaaaaaaaaaaaaaaaaactacaggaaaatattcatgagacctaacactggcccttccactggaagtcctacaacaaattacatttcagccaaccctgacaaagtcctgtgaccagggaacaccactgttccagtcctcaaacatctttctgaaaatccatctccatttcttagaaattttactgcctgtaaacttagaaggatcaaccaatttccacaagactccttttcaaaatgaagtttccccagagtctagactctctttttaatgaggttttaaatattttctatttcaacagctgtttgtctcccaggcgcagcgggccacacctggacaggatgctaagcctggatgcagctgactcaccacaggcccgacgccactccccgccccactagtgtcgccaactccggaggacaagccgctgatttcagggtgcccattagaatggaaggcccttgaaaaatccccaagcaggcaaaagagcattgtaagcaaagcaaccccacactccgtctcttcctcctctccagagaaaacttcagggaaacaagacgccgcagctagcacagtgcctggcctagtaaatgtttgttgaatgaattaattaatgaatgcctaaacaaacaccctcatgccaagactttctgggcacacacggtcatttcccatcagagtcagttcccagctgccgaccagtcaacaacatctaatcagagccatggatgtcctgcaagtcacttgctttgcaactatctccaaaataggttatcctgactgtcatcttctgggggctgctgtaaactagatttctcttagaaatcaatcaaggcttcccacctttccgaaccctatttcccctgaatgacagagaactacaaggaattagtctgaggcagaatgcattagtgccccaaaaggggcaggagatttggctcagctacctgcttaggctgccacctaatggaaagtccactggctcctcggagactctgatgccacagtggtaaaacagaaatcataatgaccacatgccacaaccactgtgggaaagagcatcagacttcccattctggtatcacggcagcctgagctgatggggcaaccttctctcttctgttataaacacatcaaatcttgaatgactatgacccaagtgggataatacatagccaaatggaagaaataaaggccatagctcccagtacacacatctgtgtacatttgcatacacgcatatggacacacagaagtgcaacccatgtacaactgcatacacacatacacacatgcaaagtgcaacccatgtacaactgcacacatacacacagaagtgaaacccatgtacaactgcacacagaaatacaacccatgtacaactgcacacacacagaaaacaacccacgtacaactgcacacacacagaaaacaacccacgtacaactgcacacatacagacagacagatatacaacccaagtccaactgcatgcacacatacacacatacacaaatgcaatggactatgtgccgcagcagcagggctgttccctgtgggcccatggaaaggatgctgggcggttcccagatgcccttccaggggcccttccaaaggacttcatgtgctgggtcgggacattccattgtcagcccgtttcctctgtggaagcagttttcttggctcgctctgacacaagtgatacgggcggaaagagcagtcccttctcacagttcagagattgttgtgaaaaggggtcaggctggagggtccgaatttgcagaacccatacctagacatgcttcatgagacagaaaaccccacaagtcctggcttcaggggaaaaaaaaaaaaaaaggagaggcaaatgcatgggctgacaaaactgacaagtccaggaaggatggaaattcaggcctggctagattcaagggctcagaggatgtggtcagggagaggttagtcttcatctgttggctctgtatttctgttcaggggaaggatggcattttcaggcaggatctcaccaaaggggccactggctttcaggcttacatccagacacaattcagcaatccctgcaggaaagcctcgctgtactggtggttctaataaaagtctcaggattgactctgactgttcatccatccttgaactaatttctgtggccaggggctggaacactcactggactagccaggtattgcttatgtgcccagatggacacggggagcgggtcagctccacaagacccacagaccaagggaggggaggagaacttgccccaaggccacaaggacagaagagagaggagaggaaaggagatggtgtaaaccataatttttatcagagaataaggtagcaatcaacttcagccttaaataaaacaaagagaataggagcataagtctttctttaatgtttttttccaacaggtttcttgacttataattcacatacaattaatcacaatttaaagtatacaattcaggcccggcacggtcgcacacacctgtaatcccagcactttgggagggccaggcgggcggatcatgaggtcaggagtttgagaccagcctgaccaacatggtgaaacctcgtctctactaaaaatacaaaaattagtcggtcatggtggcatgagcctgtaatcccagctactcaggaggctgaggcaggaggatcacttgaactcaggaggcggaggttgcagtgagctgagacagcgccactgcactccagcctgggtgacctctgtctcaaaataaataaataaataaataaataaataaataaaataaagtgtacaattcaatggtttttagcataattcacagaagtgtgcaaccatcacctcaaaatgaaaccccgaacccataagcagtcactccccgttccaccctctacacacccccggcaaaaataacaatataacctctgtttatatagctttgcctatttggatagaatcatacaataggtgccaaaaaaaataggagtttttttttttttaattattctttcttttgtggcaaaatctacaaaaagatctccttccctaaactcctagttgaactctgaccttgtggctctgatggagtgaagtctcaatccctggaatcactgctgtggaaggggcttcagttcatcccttcagcgacatgggccacaggaatgagaggcttaggagaccctccctaagaggcctggtaaaaggcagaagctggaaatggtgctgttcagcaggcctgagccgaacatggcacatcaggccctgcagccagggcagggacccttcctggaggccagggtcccgcacgcattgtctcaccccagccagtgtgtggtggagcagaaaaaaaccgaggcttcagtcaaacagatggtccaaggactccccaaggacacggcgctatgggttttctgcccagcatcgctcctcattgctgatttcaactgggatctcccttcccatgaagtacatgtgcccacagtcccaggtgtgggcctcactggcttaaaaccatccccatcgtctgccactaattactttagaaggaatatgtaacccaattggggtcaataagatatgaggctggaggtttctgagaaagccctttctcttttgtccagaagtttctgaaatggggttttctcccttcttttggatgttataagaaagatgtgaagctaaaaacggctgcagccgatctcactaccagtcttggggagatgccaacataggaaggtcgaacccaaagaactacgggaaaaggaagctgcgcagccactgtgccagtccccctccactggtcctcccttttccgtctgactctgcaccccaaattgacctcagggactagtgcaagggcttgctcctcctctgctacagggtggtttcagcaacagggagccccagcagaagacaggagggagggagagggaggctgaggcatccgatctcttccctggggctccctctctaggggtcactgtgaaacggctgctggcctcaatccaagtttcagctctggccagggctccttcgcacagccctcgctgtctccggtttccaataactcttcctccttgctcctcaaaactaggcacacacaggagccttggggctttgctatccctggagcttccctacatctgcctgcaccaccttcttcttcttttttttttttttaatagagatgggggtcttgctatgtttaccaggctggtctcgaactcctggtctcaagcaatcctcccatctctgctccgcaaagtgctgagattacaggtgtgagccaccacgcccagccaaccagcttacacctacttaaagattcctttatgtggccaaaaagcaggtgagaagatgcttaaaggcattagtcattagggaaatgcaaatcaaaaccacagtaagataaaacctcacacccactaggctggccataatgaaatacacacacacacacacacacacacacacacacacacacacacacaatagcaataacaagtcttggcgaggatgtagagaaactggaaccctcatacattgctggtgggagtgcaaaatggttcagctactttggaaaagtcaaaacatgggttatcagatgacccagcacctccactcctggccatatacctagaagaagtgaaaatgtacattcaaataaatacttgtaaatgaatgttcatagcagcactattcacgatggccaggaggtggaaacaacccaaaacctatcagccaaggaatggaatggataaaccaagtgtggtacagccatacaatgcaattattcagccataaatataaatgaagtactgaggccaggtgcggtggctcacacctgtaatcccagcactgtgggaggccgaggcagacggatcacctgaggtcaggagttcgagactagcctggccaacatggagaaaccccatctctactaaaaatacaaaaattagccaggcgtagtggtgcacacctgtaatcccactacttggaaggctgaggcaggagaatcacttgaactcgggaggcagaggttgcagtgagccaagatcacgccactgcactccagcctgggcaaaaagagcaaaactccaactcaaaaaaaaaaaaaaaagttacttcattcattcctcttaacacaaaattatgagtcttccctcactggcaataataatacctacttggtagaatgggtatcgggctccaatgaggaacatacagtatagccactaagcaggcaggctctgttaccagcttgttggacccgaatctcagctccatcccttactagctgtgtgaccttgggcaaattacttcaagcttgcttgtcctctgcctctctcctcccctcctaccagcaacagtcttagtgttctgcatacgctgggtgcataacaacaacaacaaaaaaatcacagtgtctagagttgggagggactttggatctctccagactaggggttggcaaattatagccctggtcacaaatatcactttatcaggagttttgcttctccaagccaaacattccccatcccttcaaccaagcctcagaggacaagatgttgagccccattcaccatctgtggcagcactgctagttcaccaaaactctgttttctcttcctcctgggtgcatggctagactacatttcccagactcccttgcagctgggtgtgaccatgtgtcagacttctagctaaggaatgagatagaaatgttgcatgccattcttcaggccaaggtttttaagaagtgggtgtgctttctccaggctccttccctcttctgccagtggaagctgacagcaacaaagctccagggggcagcagggccacagaatgtagcagaggcctaggtctatgagccaccacatggatgagagactcccaccgaactagaaatacacattttgggcttttacatgaagaaggaaaaacatttcttgtgtttgagccaataaacatcgtggggactatttgttattgcagctattatcactatattactaactaatacaccatcccagtctccttaatatgtgtctactgaattgaattacagaaggtttcattaattcatccaaaaaaggcttcacctgaatacctactatgtgagaaatcctgtgagttccaaataaacataatataagaatatctgctctcagaaagccacaaaatagtgggggagacagaggtatgaacaaaacagacagtgaaatgtacaaggtagagggggtgggcacaaacaagaaggtggtcaattctacccagaatcaggctggtcaggaacggcctcctggaagaggggaatactccagctcagaataaggagctcatcatgtagacaaaccttacaggccttcagagaccaacctgagccacagtgtggaggcctgagggggatgggcacatcttcaacaacagctgcaggtggaggaaggggaggaaagggaagaagggggcgtggagatgaagccgatgaggactctggagccagaccatcacagtcacctggtgagggtccaggagcatataaactgtgactacagagaaacactgatttaatctaatctagccctttccagatgaggcctgactttctaattccttgatagaaaagtaaattcccaggctcggatcacccacgcttcctggctcctgctccctgggctgtgcttgtctcttacacagtgtactttcccgccttctcccttgcctcgggcttctctgcagttcctcctaagctgtctctgtcaagattccattgtccttagaaatctaataatctaaacccttccttctctgtgctcccaaaactctctcccatggatcagcctcttggaggggattcacactccttgaagtaggcctggagattaacaatcatcttgacaaatcttggttcatttcccataaaggggacaggagccagggaacagcaagaggcttggtcctgggttcatagcaagttctgggttcaaatctccactgtcatttgtgaattctgggacttggagcaagccagtaagcaggctgaagcctcagtttcctccactgctgccttctattattcttaacatggaatgataaagatggatccggaaacaacctcaaatatccatctgcttcacctccaacactttaaagaataggaaattgaggtcctcagaggttaagcagcctgaggtcacagttgacggcaaagtcaggtctagaatccaagtctatgtataagcacagtaccaagtaatagaactaaattgcgccattggtttcggtcagtttacaacaactattacaatccatatttatactttttttttgagacagagtctcgctctgtcacccaggctggagtgcagtgggtcaatctcggctcactgcaacctccagctcccaggttcaagcgattctcctgcatcagccacctgcatagctgggaaatatgttcaactttagcattaaatttaaaaatgcaaataaagaacatttatctttagtccatcagctatgcaaaaattaacataattgataatgcctggggcgggcaagaaatgtatacttgcaaaattgctcatagaaatacagattggtaaacctttctggagggtggcttggtaatatgtacaacacttgaaaatgtgcctaccctttgtccctgaaattccacctctgggaatttgtcaaaagtaagtatttggacaagtatgtacatgcaaaaactagaaacaacctaaatgtccattaaaaaagaaccagtcaaataaattatgatctatccatggccagcaaaaatgatcatgtaaatctatatttattcaacatggaaggagagtccctatatattatatgaaggaataagttgaaaagaatgtgtaagatgtcactgttcgcaaaaactatgtgtctatgagtatatcagcatagagagacaaaagtggttatctctcattggctggataattatggatgatgattatttgcttctttatcttttcttgttctttctgaattttctgttatgagcatttactatgtttacatttggaggagaaaaagtaattgtgcagaaagtactttaaaggttatctagggctgggggaggagaattgggaaaatggggggtgactgctaatgagtatggatggagttttttttgaagggcggtgatgaaaatgttctaaaattgactgcggcgatggctgcacaactctgaatatattaaaaaccactgaattctgcaatttaaatggtgatttgcatggcatgtgaattatatgtcaataaagctattacaaaaatataatttaaaatggataacaaaagaaactataaaaggccttgaggttaaaaaaaaatcaataaatgtgagctgagcttgaaaatgggagagttgcaaaatgtcctcacatgagactgcggctgcccattctctggtctatacaggcaaactcagtcaaccagaatttctggaaaacactgtcccagatctcccagcccaggaggactccggcccacccccagcctattggtctgacggcctagcccccactctcctgatgcaattatccacatgcctctgccatgtagacaagcctcggagagcactccacttcccaagagcccttcagcaccgctgattcaaacagtaacagctctctgactttgctcttcccttcaaaaagcccagaggctaccttgtaggctcagcgtttgtttttgttttttttaaacaatttaatcttcccagtgacatgctgggattggaagagatactggctggaaacactgcccttctcagcaggtgataaaagggaccaggtgcattcattcatttaaaagagcacttcctgagcatctaccaggtagcaggcccagagacaggtactgcacttacaagagtggacaaaacaggccaggcgtggtggctcaggcctgtaatcccagcactttggtaggtcaaggtgggcggatcacgaggtcaggagatcaagaccatcttggctaacacgatgaaaccctgtctctactaaaaatacaaaaaattagccgggcatggtggcaggtgcctgtagttccagctactcgggaggctgaggcaggagaatcgcttgaacccgggaggcagaggttgcagtgagccgagatctcaccactgcactccagcctgggtgacagagcgagattccgtctcaataaaaataaataaataaataaataaaaaaaagagtggacaaacagtgtgggtcaggccgggcgcaatggcttatccctgtaatcccaacactttgagaggccgaagtgggcgaaatcacttgaaatcaggagttcaagatcagcctggccaacatggccaaatcccatctctactaaaaatataaaaattagctgggcatggtagcaggcacctgtaatcccagctacttgggaggctgaggaaggagaatcacttgaacctgggaggcagaggttacagtgaggtgagattgtgccactgcactccagcctgggtgacagagtgagactccatctcaaaatatatatatatatgtaaataaaaatacaaaaataagccatgcatggtgtcacacagctgtagtcccaactgtttgggaggctgaggtatgagaatcctttgaacccgtgaggcagaggttgcagtgagccgagatctcaccactgcactccagcctgggcgacagagcaagactctgtctcaaaaaacacaaagaacaaaaaacagcatgggtctcatgaagctcatggaccagcagagggaacagacagacaatgaaagatcagagtgacagatgttttgaaaaggttaagcataagggggatcctgggagcactgaagatggctccaaattcaatcttagggatcagagaatgacaggctaatcatcataagcatttaaaatgcctacaagttatgtcaggcactgggctaggttttaaggacacttaagaaagaagacacattcctgttctaaagcggctgacagactaacaaacttgatgtatagtatctccaaagtcctcccaatctccctacaatggccaaggtagaactgacccagcttagccatggtttggatgagttgagggaggaagaagaaatccatactttcagagttcagccgtccccaccactgccgctgcttccactctcaccagcattaagcatttgcagacagcaaatactgcttgatatggtttggatctgtgtccccacccaaatctcaggtagaactgtaattcccagtgtcggaggaggggccttgtgggaggtgattgaatcatgaaaggtgtttctaatggtttagcaccatccccctagtgctgtctcatgataaactctcccgagatccgcttgtttaaaagtgtgtgacagcttcctcctctctctctctttctcctgctccgccatgtaagatgtacctgcttccccttcgccttctaccataattgtaagtttcctgaggcctccccagaagcagaagcctgtacagcctgcagaaccatgtgctgattaaacctcttttctttataaattatccagtctcaagtagttctttatagcagtgtgagcataaactaatacactggttaggaaaaaaaaaaaaagggtaagccaagctcatatcattcttccactcacaaccctccaagagctgcttttgtcattcagagcaaaagctaaagtccacaaaatgcccagcaaggttaagccctcatccccaccccatcaaccttttcctgcaccaactttcttgtcacttactccactccagccacactggcttccttgaggtacctttaatgtgccatgcatgcagttatcagggtctctgcatggggcaggccctgtgcctaggaatcgtttctccccaaactgccgtgtgctcactccctcagctcctttgggtctttgcttagtgtcacattctcagggaaagcctccttgaacaccccatttaacaatgcacaccctccccagcatgccccagcctcctctccagatgatttttcttccataaggactatttgtcgtctcacacaccatccgtttcatgtttgtttgctatctgttgccccactggaatgtaaagtccatgaggatagggatttttctctgtcatgtttgctactgttgtcccgcccctagaataccaccggcatgcaatgtaaatgcaaacaaatatgcatggaataaatatcaaggttcctagctggagtgtctaggatgaggatacatgaggagtcattactgggcagagacggcagagcaggagtgggtgggaagggggacttcaggtgccaggtcatggggaaaacagcttggccactctgttcagtggctatttttaagccatccagagctgagaagcctttacctgcttttcttgatattttaaagaaccggagagcaatggggacttcatggttatacctgccagtaagagttatcatggcctcccaggagccaccatgtctcaccccttcctcccagggactcagctcctcttgatattgacagtgtgtttactcctatgaaatgcaagcccttccaaaggccagctctctcttcccacctctgattaattaggtttcacaagcaccaataagcccttgccgagaatcccacatgtggacagggttcagtgtagaacaactgacttttattcagggcctctcagatgccacatacttggcctataaaatcccaatttaatctccaccatactctgcagggggtattggcagcgcaagtggaaaggagaggaaactgaggctcagaaaaaaggtgccgaaggtcaccaagcaagggacagagccagattccatgaaggactccaacacaggactatgtgataccagagtttacactctctctgtcataccacactatctctaagacatggaataactcacattgttcctttttcatccttcagaatccgtgcttctccccttcagtttgaatatcctctcaatgcaatgcacagggaggccaacacaacctggaggtgaaggaggtacagctgagccccaacagagggatgtttctaaagcacaactcacaaatctcatcttcctggtggcaggattaagacctaccttcttctcaatttcaatctagtctctgctcactgtgcccctgtatcttaagcccctggctcccatcccttccacatcctaccacatcaacctcttctccaatccttctccaagtctctacacttggccacaaagcacccgccccaccattgtctacatggtgactcatgggccaccatctgagagaactttggggattcccttttcccacacagtcatgcagtgaatcaaacgtcacttcacctcttgaggaactgtccctcttcagtgtccatctcactctctagactgggaatatttactttgaatcacctgctcctagtataataccaacgaagttcccaaaaaatgccactggaggcatgtctaaaatataaaattggaaggaatattcatgccagtgctcgctaaattaaagccacaggactatctacagtcagacacatgtggccaccttctgggtgagtctttaggccaaatgccaaatcaccaccaccatcaccatcatcatcatcaccaccaccaccatcattatcaccatcatcatcaccaccaccaccaccatcttcatcaccatcaccatcaccaccatcagcagtggcagcagcaccactatcatcaccatcatataactaccaccatcatcaccaccatcatcatcatcaactccatcatcaccactatcaccatcatcatcaccaccaccaccaccactgtcatcatcaccaccatcatcaccatccccccaccatcatcatcaccatcagaactaccaccatcatcatcactaccaccatcatcatcatcactaccaacatcaccaccatcagcagcaccattatcatccccattaccaccatcatcatatcatcatcaccatcaccaccaccaccaccatcattatcattgcattaattttctagggctgtcattaaaaagtaccaaaattggatggcttaaaagaacagaaatttattctctcacaattcaggaggctagaattccaaaatcaatatatcagcagggccacaccctctccggttcttctcagagagaatccttccttgcctcttcctggcttgtggtggttgccagaaatcctttatgttccctgaattgtagctgcatcactgcagtcacaggggtgtcttctccctgtgtgccttgacatcgtcttccctctgtgcatatctgcctctaggtcctaatttcctttataaggacaccagtcattttggatccaggctcgccctaatgacttcattttaatttttgtttcctctgtggagagcttatttgtaaataaaaacacaatctgaggttttgggggttagtacttcaagatatcttttgaagggacacaattcaacctgtaacagtcatcttcatcaccactgtcatcaggatagctaacatttcctctccccctagttccatgtgccaggcaccactctcactgttctccatgtctcactttagatagttctcttgacaaaacctatgaggcaaaagtcttattctctccatttgacaggtaacaaaactaaggctcaaagaggtttgaaacttgcttacagtcagcaagtagccagtaaaaagccaagttaggacccacacctaagtccaggatccaaactcttaccagccatccataccacagaagcagcgttgtttctggtgtatgattaccctctgtagactctgtttcaggtcccatgtgattaccatctgcaaacacttaacactattactttcttcaagctggaagtttaaaatatcactactgaacttaacttaccccaaccaactttcaacttgttccagaaggagaacacccccactcccccgcaacacacacacgttctgtccattaagattctttgggaaaaatgagttttgaagaataacgcatgtatacttcgctgactaattcatgtggccctgcttatgcaaactcctcaatttgttgttctctataatagctgcctggagggcagcctccactcatttcatgatgatacatcccagagcctgggcaacgtgccccagtagatggctcctgattgcccaggaagttacaaggtggccaatggaaagatcatcggcttgaagtcaggaagcctgagactaagtcttagcttccgtttcctcctccaaatgaactcccctgagcaccagggccccgatccttctggacctcaaagacaactcaaaaaagcttctcgaatttagcaaaagagagattgtcaaactctcagctaaaaaggaacaaaggaataattcattcatcaaacatgaattaagcatctggtctactacaggatgggcagtttgctaagtggatatgaaggactcaccaagatgaataaaatggcaaggaggaaagaaaacctgtgtgtttgtacgtacgtatgtgttaggatggcactttaatgtatttttttactcactcatccctcagtaaggcaagttatctccatttcacagctgaagaaatgaaggtttggcaagttgggtgacttgtctaaaggcgttcagtgggtaagcagagagccagggctgaccctcggtctgagcagttgaaacgtccagctgctttcctctgaccctgaccacctgggcatggggatggagactgaagcttgttaagcaggaaggtgacccaatctgaagttttaaggagatttccctgaggcagctcagaggatgggctgagggcagtgaggtaggagagggttggatgattccagagaaaccacccagaacactgacccgaggcaggaactgtgggatggacagaaggggctggactgcagacactgggaaggtgtattcagaattggtttgggttggaagaagagcaagaaagaaagacaatgagtgacaggcgtgaagggagtcttctctcttctcaagctcagacctagaaagcaaggacttcgggaaaaacatgtcacagctccacttcctgttccacttaaggagcagccaaagtgctgcagctgtgggaggagaagaccggagagaagggaggacatagacttgcgcctccctcagatagtttcccactgaagccaggaactgaccactctaagggacgcacacactagaagaatcaggaggctgaggaggtgacaatgttttgagacatagacatgactcagccttgccaactggccagaaatcagtgtcatggctctctctcttccccatcccccctccaaatgatccccatgccagccaatcctactgcctccccatcttccctcccagactcctgtaagagcatcagagctggccttcctgcttccagaccctggcatcaaccacctaatctattcagtccaatgtagccagagtcacctttccaacaggcaagtatcacatgacccccctgccttaagccttcagtggttcctcagcggcttcaagataaagttcaagctccaggatatggctcctgcctcctgctctgacctcaacacatcctacctcaaacgttaggttccaaccataacgaaccacttgtaatttccagcacatactgtgctattggtaccattcacatccttgctgaggctccctacacctagaatttccttcccttccttccattctttactggctggttcctattcgttatttaagattcggctcaaggattacaccttgtaacaagtcttctctgaccctccctgcaaggtggagtcaggcacctcttcctaagtgcccattacatgttatgttcctgcaggaccacactaaacatgctggctcataattatctggacatgtctggcccccattcatatgagaggttccaggatagcagagtatgcagcacaacagctggcaaatggtaggcacttaatacagaaagacagagacagaaggggaagagtagggagaggtgaaggaggaagaagacgaggaaaggaggaaagggaggagtaggagggggaaagggggaagataaggagggggaaatggcgaggaggaagagaggaagggagaggaggaggaggaaaggaggaaggaggaggagggggaagaaggggaaggggaggaaagaaggagagggaggagaaaggggaaaatggggaggagaaggagggggaaaatgaggtgggggaagagagaggaggaaaggaggagggggagggggaagggggaggaaagggaagagggggagagggaagaggaggaaaggaggaagatgggggaacagaggcaggaggaggggaggaggggaaagggggagaagggagagagggaggaagggaggttgagaagaggacgacaaatgttacgggtactcaaagaagaaaataatcacaatagtaaagactgggaaaggcttttcagagatggtgcacctgagccatgctttaaataataagttgggtttttggcagatggggaaggtagggaaagggcattttggatgatgggaacagcaagactgtgaaagtataaaggttcttcattttggaagagaattcaaacagggtggttggctaaagcctagggtgaatgaggaaagtgtagtgaacccagaatcttctagatgccatgtgagttgttcatcccactgtgcattcattaaggtgttttttagttacaaataacagaaaactcccatcagaatagtctaaaggtaggtgcttggtgtctcattccttccatttttctgctctgacaccctcaacacatcctccctaagctaggctccctcatggtcccaagatggctgccacggttccaggtatcacatgctaaccccagtacgtcccacaaaagaagaggggctttttcttcctacatgtctctttttaagatgcagaaaaatctttcttcacccccactgccaggcaatttcccttcatatttcactggccagagctctgtcagttgcccacacctaacccaatcactgccaaggggaataggacccagtgattcacccactggagggtggacatctgaagatcaatgtcctgccagcaaaagagaaggggaaaagatgttgggtaagcaaccactgtctgctacacctggtcgctcactcgcccccgcagtatgctgctcaacagagtgtagactgcaaatatcccacatctccaccctgctgccattctattttagggctgaggaagtaactgtcctacgagaggaaacttgctaacagctattatgggaaggtctataaacgacaccatagtttgcttttctagatcaggagttctgtatcagtggaggcataggaagtagcagggatgactgcatttcagacagaagccccaaatgccattttattttaactaagagtttcacctttctccttgaacacattttccttagacctccccaaaaatagccagcacattcctaccacaaagccttcgatccagctattctcagccttgaatacccttcccttctctcctcacttagggaaatcctgcctatcttggaagagtaaagcccagacacctctttcacaaagctttctctgactaccccactgggaggactctctcccttccctatacagctatgactgttccttggtaactctcccatgctgttgagtgacactggtgccaaattattaacagttacatatctttctcttctattcaactggaaggtattctagcaggtggactttgatttttcatcttcatatcctaagtgcttggcatatagcaggatatgcagggaaatctgtgcaatgaaaactcttaaaagtgaattcactctttcatgcttcttctccctactgatcatgcaaatgagaattcttatctcattttgaaacccactaatttttgtttagtaccagttacgtgccaggcactcgcttagccactttccttatatattgctttatttgacacccttaaaaaactgtgagagttttcacaatttacagactagaaaactaaagcttaggcaggctaagagaaaggctaaaagcagactcttccaaggccacatgaagaattaaggcgtggaattaaaattcaagtctgtagaggcaatattgtatcgtggtcaagagtatgggtattgaacacagatcgccttgcttaaaatcttgccaattacaagggccaagcatggtggctcacacctgcaattccagcactatggaaggccaaggcaggtggatcacttgagtccaggagttcgagaccaacttgggcaacacagcaaaaccccatctctactaaaaatacaaaaattaactgtgcctggtggcgcacacctgtggccccagctattagggaggctgaggtgggaggatcacttgaacctgggaggattacttgaacctgggattgcaaggatgcagtgagctgccatagcgccactgcactacagcctgggagacagagtgagaccttgtctcaaaaaagaaaaaaaaaatcttgccacttactaactatatgacctcagggaagttagctaggctctgcgtatttcaggttcgtcgtatataaaatgggagttagaaatagcgcctatttcatagggttattatgaggattaaatgagctcatagaggaaaactgcttacaacagtaatgacacatattaacgagcaatacataatagctatcactattgattccaagtccagtggttttcccacagcatcatgacaaatgctcctaccctccacccgccaagtcaccttaggcaggaaagaatgacctagccaaaggacagcccactggaggggtcatgagaaccactggccagaggaggagccgcaaagaacagtgggtcaaagatcacaaacgcaatgacatgcaaaaattccatcccagaacggctctctgtgacggctcggcccatattgatgaggtcctgagggaacttctaggggaaaggatatcacatgagacaggaagcaggtcagctccccagtgcccaaatactgaccatacaccgaacaatagccccttagctcgaacaagctttgaagacctgaaatgcttacagcccatcccctgaaaacccagtgcccacagtgattacagggcgaggtgaaggaagttcccaaggcaagatggctgctagaaggcacgttggctgctggaaggcacgctgtcccatcggccttgaagacaagactgaccccttacccctccgaggctcctacacttccatactcattatcgcgctgtaacctggcggggagggtgactcaggacagaagctaccatcccctttacgcaggtggggaactgaggtccacagaggataaatggctactatttgaggtcacataactagtcagtatccattccaaactagaattcaggacttctgagtctcaattcagtgatattcttcagcatcttagtaagtcttttgcgtcagcatgcgtattcttcaagcacatgcattttctttctttcttctgaaatgtttattgtcttccctgtgctagacttggtgctaggcactagggattacagaaatgatcagggccctaccactgcccttgcacctccagcaggcactgcagcaggtgaatgcacaggacgcactcagtaagtgcttgctgatatgaatccaattgtctcattactaatgttctgttacagatttcagttctttctccaaaaaggcaatttttacatttttataaatgttctttcttttcctggtctgaaaaagaagactgaatattaagctagctggttgcaacttggtgtctcccagaattagaggagaactgagacccctttataaaatcaggaccctcaaagagatcaaaatctaaatgatttgatctctaaaatgagggcctgaattattcctcccatcagcccagagaaatggcaagaaagcaggatctgagtaaggaaaaaaggcttccgtgcagattttaaagcctctgggtgtgactgtggaatccaccatacaccattggtctggggtcaaaatatgggcccagaagctcccatagaaacttttccaggacccaggaaacacttagggcctttgctgaagcataatactgctctgtggagacatctctgctacccaagataggtggggctctcctggggcatgagccactaagcccccaaaccagaagacacaacaaatgggagaactggctcctctagaacgaacctagagcaatgtgaaagagaacattagtatatttaaaatgaagatataaaacacaaaacagaaaccctaaggaaagaaaaggacccaaggatggaagggcaggctgaactgaaagagaactaagaatttctaaaagtaaaatgtatagtcattaaaattataaactctcacctgtaatcctagtactttggaaggctgagacaggaggtccgcttgaaactaggagtttggtttcttttgagacatggtcttgttctgccacccaggctggagtgcagtggcacaatcttggttcactgcagcctcgacctccctgggctcaaacaatcctcccacgtcagcctcccgagtagctgggactacaggagtgcaccaccatgtctggctaatttttgttatttgttttttgttatttttggagaggtgaggtttcaccatgttgccgaagctggtctcaaactcccgaggctcaagcaatccacccgccttggcctcccaaagtgttgggcttacatgcatgagccagtgcacctggccattgaagccagaagtttgagaccatccaaatataaaaaatgaataaccaggcaaggtggctcatgctggtaatcccagcaacttgggaggctgaggcaggaagatcacttgagccctggattagaggctgcagtgtgctatatttgtgccactgcactccagctggggcaacacagcaagatcctatcacttaaaataataataatataaaaaattaggctgggagtggtggcttactgtgatcccagcactctgggaggctgaggcaggcggattacctaaggtcaggagttcaagactagcctggccaacatggtgaaaccccatctctacaaaatacaaaaattagccaggcgtggtggaacatgcctgtaatcccagctactcaggaggctaaggcaggagaatcacttgaacccgggagggagcagttgcagtgagccaaaatcacaccactgcactccagcctaggcgacagagcaagatttcatctcaaaaaaaaaaaaaaaaaaattaaaaattaaaactcgatgaaaaaagttcaacaaatgtggtaacacagctaagcagctgaagccaatatacctgactcagcccccttgttcagtgcctgtcatttgctgggcactgtgctgggcacaaagggccaagaggaataacatagagtcccagttcccaatccccttcaagatgccccagctcacaggtgaggaactatatgagcaaacacatttccctgcaagacagctgtaataacggctaccatctacgagacccttgtgctggctgcttttcttacattatctcagttaagtcagtatggtcagtgcaaaagagaaggacaggtggtgactacagtagaccccagaatcttctggttttcccacccaccgaccattccactgagccatcctgcatcccccaaggtctcaggagagaacaactataatggaatgcctgggcaccctttttacatttctactcaaaaggaaattatttagatagatagactaactacaatgaaataggcacacagtgttgttacacacaggacaagtttttacagaggcagaagccttgaccaaaaattcatgattggttttgaaagaggaaatgtcaacatcccccagaagccgcgggtgggcgctgtcttgacgcccttcttcctgttgtgcccacggctgatcctccccagctggcttctgcgtaactcccaccacagctggggaagtactgacaggcactcttctttatcccaaaccaggctccaaccaggatcccgccactggagggacatacttacttttgttttcctaactctgtgcaccttcgcacttcctgacttagggcagtgaaggaagaggaaacaccaaaaatattacaagacaagcttagtttgtggcatttccaagagatgggagctgaaggggctggcagggtgaccccaggcagcagacgccctcagtcgctttgtaactcagctcgtcggtggccaagagagctcatgtgcctctccaaagtgcttaaggtctcaagaaaccgtctgtttctggggaggatctgggacaggagcccattttctctaaataactgagaggacttcagaaatctggtattaattacccctcgcagcaacgtggctacacagcacatcatggtgtgtttcctttactctcagaagatggggccaccagtgcgccaggccctccagttgcttcttcccctaaggactcagacggatctgtcctaatcgaaccacacactccctcctgacctctcctggggccaatggcctgctctgggaacagggctggctgaggttagggacctggctgcagctttggaacaaggttttagccatacaaaaggaacaactgtagggatgcgtgctgtgctaggaaatggactgggggcagactctgaagtcagaggacccagctcacaccctgcccatcccttcctgggagaggacttggggtacgaggcggggagctggtagagggtttgcatgggttggtaaatttaatttttttcaagaggctgggtgagaaattagtgtccctgggttgaaagtgaacaatcgggccgacagctgaagaatgcacagtgaaataaatcctcaactccaactctccacggaggcctggcacagagaagagctctgacgaaggagtgactgtgaggacacagtggaggctgactcccacaagtgcatcactacagccacggtaagatgtccctgaccctctcttccccatgggttaggaacctctccccagagctcccgtaacacccttctttcccaggctgcaaagatatcctcatcctaatccccaggacctgggaacacattaggttccatgagttacatggcaatggaaaatgaaggttgcagatggaatcaaggttgctaagctgttgaccttaaaatagggagagtagcctagattatacaggtggcccagtggaatcactttaagggtccttcaaggtggaagaagatgccagaagggagaatcagagagatggaagcttgagaaggattaagaccaacactgccggctttggaggtggaagaaggaaaccacaagccaagatatgcaagtggcctcctgatactggaaaagacaaggaaacaaattcttcccagcgctgccaggagtaacatcctctgctaacaccttgatttcagcccagtgagatccattctagacttctgacctccagaactgtaagatagtaaacttgtatgatgtaaaccactaagtttggagtaatttgttaccgcagcaataagaaactaatacactatcattatgcttaccctaatgtaatgcaatttttatttatatgtctatcacccccatcaataataataataatagctaacatttgtcgaatttacccttactgtgagcacttattatctggtaaggccagcaccaagtgtttcattcacataagatattaaaaaaaaaagggtaacttcagttgaacacacaatgaaggtaaacacagggacttaagagtaggggagggagttaaaagcatcttcgaggagataaagacacaggtgctttttaaagatgagtagcaattagcctgggagagaggaagagcatcccccgcagggggaagaacgtaagcagacactcagggaaatgaaacacagggcatgtgccggcaagcactctggcagctccacagcaggctggtaataatgtctctagcctgtaagtctcctcggaggtccaggcctcctgcctgcctgaaatctccacaggatgcctcctagacatctcaaatttaggatggctgatacagaacttgattttctccatgagcataatcctcctagtcttcctgtctcccacaacaacgccaccatacacccagctgttcaagccagaaccccaggagtcacccttgagtcctttcccttgcctcattccaatgtaatctatcaccagatctcatcaatgctatctccaagatctaagtaggctcctcccacttctctctacctccattgctgctgtccagttctaagccaccatcctctttcctcctaagtggtcttcctgcttctacactttgccccctatgatccatccacttttcataaaagcagtcaaagcaatctcaaaaatgtccatcaggctggccatggtcgctcacctgaggtcaggagtttgagaccatcctgatcaacacggcgaaaccccgtctctactaaaaatataaaaattagccaggtgtggtggtgcatgcctatcatcccagctactcaggaggctgaggcaggagaatcacctgaacccaggaggcagaggttgcagtgagctgagatcatgccactgcactccagactgggcaacagacctagactctgtcaaaaaaaaaaaaaaaagagtcaatcagatatcactgctgagcttaaactcaccaaagcttccctttgtactgggtggagggactctccccagcatggcttagaatcggctgtgtgatctcgtccctgcttccctctcaaacctcaccttgcgccattccccccatctctcccttacactctagccctgccttccctcactccttggaatacaccaagctcttttgtgcatagtcaactttgcacattcccatccctctgcctggaaggccctcccctgcaatctctctgcctggccagttccttctccattttccaatctcagaaaggctttcccttccaaaactaggaccaacttgtgccaccagcccctactttggtcccaggtttgtttccttgataacaaggaatcactcatctgttagaggttgtttcttctgcttcttccttgttgctcatctcctccagaggaatgcaagctccagaagggcagtgccaggtctatttcgtccaccactgtatcatcaggactccacacagggcttagcatggcgcaggtgctcaatgcatggttgttcaattgatgaattaaaagagaaagtgtgaggctgacattgaaagatgaggctggaaatagaaggccttgagaacagggtcctattcatctttgcaggactggcacctcccacagggaagccacttagcaaatgtttcactggatgcatgaaagaaaaactcgattccagataaatctgagatgtgctgtcctttctgggcaaggctccccaagaagtttccgctcctccttaggacttcttaggaggtaacatgtctagggcatacagcaagtgcttaataaatggggtgactgttactattgctcacgtggggatcactcatgcagtctcctagaaaagaccttccggagcccatgccagatacagcagtggttgggtgaaaaaacggcagggaaaaatgagaaccgagcagcaggatccaaatacggctgagacctaggtggggaaatggcaggaacaacactgtcctagctaactggggttcccttctttcctctagacttcagtcacctaggtgcagcatggagatgccagctgggacgtgagtcttcacaagggagggctcaatctgaatgcacacattcatctttgggcctgccaggcttgcactgattttgaaaatctggctcgctgtggctggtgaggactggggaggtgtagagaatttcaatttccctcaccaaatggcaagcttgcgaaaagtcctttctctccaacattatcacatactaaaaatgaaaaaccagccattcagagctctcatgagaaaaatagatgggctgcttagctcacaagaaacaggagggctgaaaatcaagtctagagaacatcagagggtacattatgtgctaagatactgcccttttttggacctgggagtttctattttgcacaaaagaatgggatagggaaagtaattccccgtataataagccactcattttatacttcaaatccatttggtagctgaatctccaaatccacttagtggcgttaggtgatttttgttttttttaactccctatctcaaaatatgcagtttgaaataagtgcatatctcaaaaatagcagcattaacaggacagaagagaaggcactaaagtggtgaaggctgtgacgcaaagaagacgtttccaaatctgtttcatggctaacagatcaaaatctaacacagaaggggcatgggactgagcctgaagaagtggaaactactcctggccatgtgatcttgggcaagtcaggtcacctttctgggccttctctgaagggggtgaatcagttgttctcaaagatctttttctttccaaactgttcactgggtgtttccagaagacccgcattttcttaaagctatctggccgcgctacaattgcaaaacagaaaggctttgggatgaaggttgcaatacagataaccctggcctaaaaactgataagcttttacaatcccaaaacattactcagcaatccaggtcctgatgtcatcccagaatcaatcacgccaagataacctaacagagtagacaggggaaaatgcgagagaaagttcttttgctttcctgacgagtacaggtaaagttgaggtcaagttaacgatgatggtctgcagttgaccatccttctccctgagctactggaaaaccacattattaaaggaaactgctttagaagtgcccaagatgaacctcttgggatgtatcaaaccgcagaaaaccggacaccggcaagtttcttttttctttgaaacttcatgtcgctctcagaaaacgcagcaggtcccaaaatggtacaagcagaaaacacaagccacttcacggtccgcccaggagccaaccccaagctccaagtaggactccccccacccccttccctttcgtttctcttcttttgctttaggcaagtggcctggggcctgccaagcagcgccgggtccgggtaggggccgggggccgcggggaactttcctcggctgcaccagagacaatgccgggagggcgccccatcggcggggtccgggccgccaagcacgtcgtcccgggccctcccccggagggggacgcgaaaccccccagggcgggccccgtccccggccccactgcaggggccccctctcccgagctggaggcgaggagacctcccccccccaccgggcggcctcgcccggccccgcagagcctggccgcgcgtcccgcacacgccccagcccagggccggcgccctccccgcggagaaggacaccccgctgcgagaggagccgggagcccgccccgcgccccgtcccggcgcccttcttcgcgcgagagactgggcagggggcgcccgcgactgtgggcgactccgcccggccccgccgagcgcgcccgagcgccccgcaactcaccgggacctggcgggccgctgggcattattccatcgcgggttcggccgggcgctcgcggctctcgggtgggaaagcgaactgcgaccgggaagcgccggctgggcgggaggcgcgggcccggggctgcccagcgcacagtgctcgcccgcggcagcggccaggccaggcgaggcgcgggagccgagcgcggcgcaggaaggggcgggcgaccatgtgccgagggggaggaggccgcggcgacgcgagcggctcgcacgatcccgctcggcggcggagggcgcgggtttcaggaaatccaaacacttcgacaggaaatcggaatcctgactaagcattcccggccccgagccgctccgcgccgggggctcccgcctcgcttaacccttggcccgccggcagccacgaggggggcgtgggaggggccccagacctcggccggggtcgggcgtccttcgccttccgccccatgccccggccggccggcctcctccccgcctgaggtggaaggggtgggatttatccacagaaaaccctggacgcggaaggtgcctttctaaggccgggacagcggcaaaggacgtgcctgtcttccatctgcagaggatggacctgcactgtcctggccgttacccctattttcagtaaaggaatgatttcaccaggctgccccctttcaccacttcctctctgctcttataattttatttttgcccagtgccaagggaacaggaccttcccagtcaggatagtataggaacagtatggagagtaattgtgtgggctgcaggctctgtgtccggttggaatatggccttttttctactcatgttaccttgagtaactcgctcaactttcctgagcctcagtttccatttatgaaatggatgttaattccaccctcataggtttgatctggaagctgaatgtttagacagggactggcacattggaaacgcccaaataaatgatagccatgcttgtccttattattaccattaaaagacatcagagaaaggaggattttaatttgtgggatgtatattgtgcatatctatgtctactttcaaagtcagagacagtagtctttctttagaacttaatttccctcctaatcattgggtgattgtttttctttgcagcatttcagaaacggctctctgcagaggaaatggttagtggctgtggcagacccccttctggtgaaatccgaaacagaaaacctcacaaaatttgggattttgctcctaatctgagagtctgggtgtagtggggagtgggggttgttaaacagtctggagcggatttacaaagtttgggaaaaccaaaatcaatctctgactgggcagagaggtcgggcagccaatgagtgattcattgtggtttcccacggaaatgccacatttcgggggtgtctacctggaggatgcagcttggtggttttgctgtaagtgtttcagattcctttgaaacccaatcagactttgaagagggaacaacatgctcatgagcgaaaacagaagcctgaaatgaacctgctgggaactgaaagttgggtaccagctcgtttactccaagtaaggaacagataccagttttagacccagcattgttccttttctgcaattctctctccgtggccagaagcagtaggacagctctgagctgggcaccaggagtcccagggtcctgctccaggcccac

SEQ ID NO: 45 - DNA, 201918 bp, Homo sapiens
  source 1..201918: mol_type = genomic DNA
aactgtagctgggaaactaggtaggcgggaacagaatctgcctggtgttggagaggatgtattaatataaataataaacacaaaacatgaattgtagaaggttgcaaatagaggaaaacttcagacaccaaaaggatcaaaaaacataaaaagaaacagatacaatttttaaattgtaacttgttgtctagtgcaatgataaaagctatccacgaatacagcgattttagaaagttaaattttacatgcagtgctactaaaataccaaaggccatacataatgtctgacccaagctgccacctcatatagcaacttcttacatgggggctttaaaaagattgtttgactggtctactgtcctgcagtgtcaggagacggctttgtctgacatattgaatttccagtgtctctcacacttcctccttttcagatgcacaaaaggtttttgtaaagtttctcttggttttaccgctggcagctacagaaaccatgccacaagtctggtgtagagttatagggtgtgattttatttgactggtatcttcagagcttctggatttttcagtataaccgagaatttccttaagagctgtaaataaaaatcggtaccagttcgaaccctttactggcccggttttgtgtgaggttggctggctgctgtagcacgttctccccctcctcctcctcctgcaccccctcggttccctcctctgcctgcgggaataccacttcagggcgttcagcagccttcccagggtgggtcctggcctagtaccctaaaactataaccgagaatacctatcattgggcagcctaggaaacgcgactgggacttttagtaggggcccctcaccgctctgaagcactcacacttgagtcagggaacatgggtttgaatccccacccggccgtttatcttgtgctcttgggcacactgtgtcccctatataaaataagcacccatctcttcatctgtctcctaggcctgcgacgatgcaatgactgcacgcaaagcgcacattcacggtcaggtcacttctggcgtccggctgtggtccccgcagggtgcccgccggcggagcgcatcctccggcagggggcgagctccgcaccccgctttcctcatgggccggcgcggcccgccgttcaagtggggagcccagaggtgctccgcgccgtgggcggggggcggttggcgcgcacaaggccggactccggcggggcgcacctccacacgcaccctcgcgggcagcgggtcggagtcggggcctcgggccggctgggggcggggcatgggcgcggcgcgcggggcccggaacgccgagacaatgcggcgcgcggcggccaggaacggctcggcgggccggggcgcgcgccgccttccttcctgcgggatccgcttcccggcggcgcggcagcggcgagcgcgccgattggcggcccggtcctcccgccgccccgccccacgcccggccggccgccgcccccggcccggacccgcccctctccgcgggaggcgtcggggcccgcggctgggtggcgggtagttcccgccggctgtgcgcgcccgcctcggggctcgctctgagaggacgcggcggcagcggactcggagccctcggcgcgcaggcgggcggaccggccgagctgcgcggggctgcgcgccgcccctgctccgccgccaggccccgcgcggctcccgcgcccggcgctcccctttgtccgcgggccggagcggcggcggcagcggcggtgtccgagcggcggtcggagcctgctgcggcagttgaggcggcggcgcccctgcggctgtgcgccagcgccctcgcgccgaggcgatgccggaccagatctccgtgtcggaattcgtggccgagacccatgaggactacaaggcgcccacggcctccagcttcaccacccgcacggcgcagtgccggaacactgtggcggccatcgaggaggtgaggcggcctgcgcggcggctccggccgcaggtatcccgcgccccagccccgcccgccgctcccgcatccgcatcccgagaaaactttctttgctccgaagccggacgcggccgggccaaccctgcccgagacagaagccctttgttcccgcctaggtggctcggaggagatgggtgatggccaccttgggcctctttaagacctcccctctctcggcctcgtggccctcgcggggttccgcggcctggtcttttccccgcagcgcggccaactttgtccagagtcggggtccgcggcgagcgggggatcccgctgcccgccgccgcccgccgccgcccggggtctttggtacccggtgcggaccttatcaacttgttcttgaagtggaccggcgggggcagctccgcgctccgagctccccgccgcagcccccgagcgccgcagggcccccaccctcgggtccgcgggtccggggcatcccgggctgcccgggaaggcgtgcccgcctcagccagggcggcctggctgcgctccacccgtgcccggagaaggaactgcgggcaaggtgtgtgagagtcggcgcttctgggtccaagaagcctccaggagccgctccccggttacctgggtctcacctgcttgaacccggaatgccgcccttccccctcaacctggaaaaggcctggttttagtaaagtgctctcaaggtgcaaagtcatcacgcctagctgctaagcagtacgctctccaggtcctggggagaggaacacgtaggaacgaagaagcttggttgaaaattaaagccgtggggaaaggggcagagtctgtgagtccaggggccaccgttggctgtggtttgaggcacatcctcacctgcagtcctccttttccttacccatcaaacgggattagtaatgcatcctttccaggatcagagactgtgtgaagtgcttagcactctgctcggctcagaataggtttacaagtcacacgtgtggcaatagtgaatctgtgattaaatgtctctgggccaggatgtcaggttacagttttaaaattgggtattgcaggtgttttagcagaagacgcctgggctagcaggagtgtgtgtgtgggtgggggggtgggtgtcaccaaagagctttaaatgaagcaatggcgttattttttttttctggtttttttttttttttcccatttgaacaaagcatctgctattaggaattgcttgaaaaaaaatccagaatgttttcccttaatggaaaaattttttctttgtagctgtaaacagtcaataaaagggagtcaaaagtaacattcagcattctgaatcctgttaatataacttgggtagccttccttctctccatttaatttggcggaagagagctgcatgtaaacctttcctatgaattcggtgattccccagatcacttaattctacttttagcagcaaggcttacagatgatgccttcaaatgaggcagatggggatgggtgaatgaaattttttcctaagtgccagttaaaaagcacggtgttttgagaatacaccattaataatgtttatggaatgattgcaaccaaaaaggtagctgaatatttcttaagggaaggaagcattgtgcatgatgtctttctttagaaagcttgattatgtttaaagttctgttgcttttccccactgcagtttgtcagttaaatattattaacactggcagatgttggaaagccaagcaaacaagaattgctattaaaattggcatacctttctctgattaattttagtttacagtgtataattccaaagctctttttgtatgctgtgcaggagattaccctagagctcagttactgagcagattacaaagagactggatttggtcatttcattaaattgcaagcttgcttcatgctgccgtctaagcccaagaattggttcaagtctcaaaatggaaaaattaaaatcatttcaggtttatttcactttaagcaaatctacatacatgctatgatgatggtatgtgtgagcttggttttataactaaatttgaaagttgttcactttctgaggtaaatcaatgtggatttctttaaataatgctctttcccaggtgtctaatgttcgtgtctattaccaaaacttgttctatgtatggtttaataacaattgatgtgtacagtattttggttttaaacaaaaatcttctcatactgagacgaaacatgagagggtatcatgacataaagttactcatttaacaaataaataaaatttgcaagctcttggtcttatgtttaaacaaatgaatcacggaactagcaaactaattttatatttatttatttatttgttacggagttttgctcttgttgcccaggctggagtgcaatggcacaatcttggctcactgcatcctctgcctcccaggttcaagcgattctcctgcctcagcctcccaagtagctgggattacaggcatgcgccaccatgcacagctaattttttgtatttagtagagatggggtttcaccatgttggtcaggctggtctcgaactcctgacctcaggtgatccacctgcctcagcctcccacagtgctgggattacaggcgtgagccaccacacccggccagcaaactaattttaaactgattaacctttttgaatctgttatttccaatgtaggttctatctgccaaagaatcattttacaattaaaatgtgctgttttgatttgcatacttgttgctggaatattattatagtaactgttgggcccttatcctgtactatgaaactcacaggtattgaattcagtccttatctctgctttataggcgaggaaattgaggctcagagaggttaagtaatttgccaaaggttatagagctctgaagtggactttgaacttggctcctgctgttttcagaaaccatgctgcttcctgttacttttcttaatgccgaattctctaaattactcctttgtcagattgacctgggttcaagttcaggctctacagcttgccagctgagtgaacttgagtgagatgcctaacattttcttattttcctcagctttaaagtctggttaataatacctatcaacttcagaggattgtggtgagggtttaggaagatagtacatagcacagaagctgccagacaattagttaccagattatatagttagtgagtccacaggccccagtgagggcttttggagtgaggatgggatttacatggggggaagtgtcagggaaatggatgaatggctgaatgggtgagtgaatgaaacactaccgtgtatctgttaacccatgtgtttttttttttgagatggagtctcgctctgtcgcccaggctggagtgcagtggctcgatccccactcactgcaagccccgcctcccaggttcatgccattctcctgcctcagcctcccgagtagctgggactacaggtgcccgccaccatgcccggctaattttctgtatttttagtagagatggggtttcaccgtgttagccaggatggtcgatggtctagatctcctgaccttgtgatccgcccgccttggcctcccaaagtgctgggattacaggtgacccatgtgtattttttaaaagtttgttgtcaggccaggtgcggtggctcacgcctgtaatcccagcagtttgggaggccaaggcgggcagatcacttggggtcaggagttcgaaaccagcctgaccaacatggagaaaccctgtctctactaaaaatacaaaattagctgggtgtggtggcgcatgcctgtaatcccagctacttgggaggctgaggcaggagaatcacttgaacccaagaggtagaggttgcggtgagtcgagatcgtgccattgcactccagcctgggcaacaagagtgaaactgcgtctcaaaaaaaaaaaaaaaagtttgttgtcctggcagctggtgagagcatacctgtattttataatttttcacttgaccaccttctctggttcaagtcatcattttgtacaattttagcaaacttagcaaagtctggtgctgcaaccagagtctgccctgtgcttttggaaataatggaaaaaataagcagttgtggcagaaatttgaaaagtaagggttttttgttccttttttttcttctttttttttcgtttcttcgagcctctgggcactttgaaatattctcaaaatagggaaaaattgtatacatatttggaatattcatgtttttagttagaccctcctttatagcaccatccattctgccttacgtatttggcattgatgtagttttaaaaataaatttgatgttgacttgtaagtattaaaatttaatctacttccttccggggccataattctctactttgttgtccttggttaccttggcaatcccattgctgtcataagcacagggttctaactgcaggggtggggtgagcatctgggcctgcaggctcccaggggccctgccgtccatgggaccagacccctcctagcagcaacagtgggaaccagggctacgtgctttttggcaagaatgtgattctgaatgttagccctttgtgacttgtttgaaaaacagttcctccaagtccccagaacagattattgctgtcttcagaaggacatcaccttcttgcccagagcattcatgtttttggaagtgagccttgatgggtcaaacagggccaccttttaaactgtgttctgaaatttgaatttcagaaaattttgaatcacttaaggaagcagccattttctcttcatatgtgagccttcctccctgccccctggtgaatgctgaattcagtttctttcttaggctcaagagtagaagtactgatgccactcctcacgggttccaggtcctgccatgcactcaggattcctgagtccttcagtgtgctgggctgtgtgtgaggtggcaggaatagaacaccaagaagaatatgtcctctctttggagggacctacagtccagcaagaggaacagaatcctgtaaacaaatcagtgcagtaaaatctgaggaccacatctgtaggaatgcttggagtcctgtggatgtgcaagggtgcaggtggtcccagggcgtggggctgtggtgagggagggccttatatgatgtcgtaccgttgagtcttgaagtccaggcagttacctgtgggttaccaaatgctaaggcactaagctggttcattctggtcttctgtacctgcctccctgccttaggtaaatattgatctactcctgaggtggtggccagctcggcgtctgcggtaggattttcacagtcacctggtctctagagggctgctcagaccaagaatttggggtgatcctcaattcttcccatgcaccccacgtttccaggcaccggtgccttcctttgtggagcatatacatgcattccaggcccgcactgtctgatgaggcagcctaagacaaatccagctctcagccgccacattgcaagtactcagtagccacacgtggctggtggctaccatattggctcagcaaccaccgggagagccatcacctggaaacttgctgaaatgcagagccccgggttccacccaggacaatttttacagcatctccacgtacaccacaggcacgtgagagcttgcgaagcactgttcgagacggaaccccggctgcacactggagttgcttgggcgtttgtgaagcagagctgcctggctccactccctaaaattctgacttaaattagtctgggtggggcttcgagccttggcattttttaaagcctcctcccaaatagggttgataatcactgataaacagacagttacgtaacaaccttaggcagttgatacgtgctgtaaaggaaagtcatgcataacatggggatagaaagtggttctggagatcaggaaaccgaaatcaggaaaagcctctctgcagaggtgacatttgagcaggctggaatgcagagaggaagccagccacagaagatgtgggaatagaacagcttgggaaaaggccctgaaatgccaatgggcgggatcatggaaggactgaaggaaggtcagggtgtgtggggaggagtgggcgaggaagagaaggatgagagacgggcagaggggtgggcagtgccaggtcacagagggccttgtccatcttggggaaggaatttggattttgttctagtgtgatgggaagctgttgaagggttttgagcagggaataacatggtccgatatccattttaaagacttcactgtggttctagggaaaacagactagcagggcatgaaaggaaagagggagaccagttgtggggtgaggggctattgcagtcatctaggcaagaggtcttggatgaggaggtagcagggggggtggtggtaagtggcctgattgaggtccattgtacaagaagaggggtccaaacctactgatggattgtcattattgtgtgctagtggcatagaggtagacccaatagaactcctgccccaaacagggcaacagccaagctcagttcatccaagccccctgaacagaccttccagcatccccatggtgaagctgttgctgtctagagctacttagtgtcagaatccaggccagctctgtgctgcttgatgtgactggttataggacttgtgttgggaccagttccagggtcaatcaaggaaagattgaagcatagctgcatagactggggcccagggaaagagagaagcatggctgcatagactgagactgagggatctgctcatgcgaccctctgctgtttctatgcagactacagcaggtgatacttatgggcattgtcagatgcctgggatgctatccccatttcagctccccaaacactcctctttctttccctactaaagagaggtgacgttccgtgatatgaacctacctcctttgcttacgccttttctgtgtaatgtggcctccaagtggattgctagggcccttccaggtactttttttcttttctttttcttttttattttgtttgaggtggagtcttgctcggttacccaggctggagtgcagtggtgcgatctcggttcactgcaacctctgcctctcgagttcaagggggattctcctgcctcagcctcctgagcagctgggattacaggtgactgccaccatgcccggctgatttttgtattactagtagagatggggtttcaccatgttggccaggctggtcttgaactcctgacctcaggtgatccgcccacctcggcctcacaaagtgctgggattataggcgtgagccgctgcgcccggctgcctttccaggtgcttttataccattatcgtttttatcatgtcaacaatgtcttggaataaacagactaccaacccgagctggaatacttgggctgtatttttatgatgatggtcatttctatgaagggatttgactgatttagtttcttcactcataaatgtatattgggcccctaccgtatgttgtcactgccaggtgccagggatgtaaaagtggacaggatggcctggacgtctaaaaaaaaaaaaaaaaaaaaagtgaacaggactagctccttccttagaaagcacttaatagtctcatgttttatgtgcagttctgtttcatccttttaaccttgtttgtgccatggctccctttgacactctggcgaaggtgatctgcctcttcagaaaaatgttttaatgcagagaacaaaataagattccgaaggaaactaatcacagtcatgcattgcttaatgacgaacatgcatcgttaagatttcttcattgtgcgaacatcctagagtgcacttacacacacccagatggcatgcaggcacctaggctatatattaagagcctattgctcctaggctgcaaaccttacagcatgccactgtgttgaataccgtggtaactgcgacacagttacagtatttatgtgtggtatttgtgtatctaaacatagaaaagacagtaaaaatccctcttataatcttatgagaggtcgtctgtgtggttcattgttgactgaaatgtcactatgtggagcacgactgtatattgaaattcagttaggagaatattttaaaaatttttaccatgctcataatgcttctttactaaagcatttaataacaagatttactggtgggtctaacaaataccttaattttgaggtattgatgaatataaacaatacgagatatttctaataaagataatgtaatgttcatatcttttattgcaagtattgataatattaccatgtgttgcttacatttgtaattgaaagatacgataaatttcagttagaccctaatgaaaatacagataattttttttttccaatccaagtttatggaccccctggattcagacagagaattccaggcttgatggtaagatttgtttagctagttttttttttttttttggagtgatggattctttaaccactctgtttgttaaatataattattatatttcataattattatactgtccttgccatgaattggttctaagagtctagctgagaagagttgcaccctaggccagtgttagaattatgaggcgctaaaggtgtttagaagcgctcttggcggggagccatccactgtggttttacatccgtggggtgccctctgttctttcagggttatggcttggcagcttctcatctgatcccacaggtcagttcatatacttgtgcatgcctcaagagttcagcagagctgcacattggaccttctgagtcctgtaattaggattctgagctgggtaggtcctacaacccagctctcctatttgtgcctttcttgtttgtgtcacacggcatgtactgcctttgactctgcagggcaagttccattgtgaagcaccagaagattcatgggcaccacctacccagaattttaagggagactttgcagtgtgtgttattttcagtgagggtatggatttgaaatgctgctgctgttgcaagagtgtgttggggatatccagagtgtgggtgaagtcaatgtcagttcatattttttttttttttttttttctgagacagggtctggctctgttgcccaggcttgagtgcagtggtgtgatcttggctcaccacagccttgacctcctgggctcaagcgatcctcctgcctcagcctcctgtgtagctgggactacaggtgtgccccaccatgcctgtttaatttttttttttttttttttttttttgagacggtgtctcactctgtcacccaggctggactgcagtggtgccatctcagctcactgcaatctctgcctcccaggttcaagtgattcttgtgcctcagcctcctgagtagctgggattacaggtgccaaccaccacacccagctaatttttgtatttttagtagagacggggttttgccatgttgggcaggctggtctcgaactcctgacctcaagtgatccacccaccttggcctcccaaagtgctgggattgcaagtgtgagccaccatgcccggtccctgattaatttttgtatttttttgtagagaaggtttcaccatgtcatggctggtcttgaactcctggactcaagtgatcctcctgccttgccctcccaaagtgctggtattataggcgtgaaccaccgtgcccagcctcccccttgtcttttctaacatttatggggcacttattatgtgccagatatgctttaaattctttacatatatcaattattaactcatttagttattatcaaaatgctataggggccagcaaaattaggccacggtaccaagttcatggagcttggaggtgatgaagccaggattcattcaaatcaagcattttgacaccagagtctgctatttcttttagcagccaacagcctctgtagagcccgtgcccaccaaggcccttggtgttgcagcctctgtggccagcatgccctcccttgctgttagtgttagaaagttgcagctattgcattgctcgagtgggtgcttctggcaaatccttgttgcttctcgtttcctgtttgcctcatctgtcctccttgctgcagaaattgttcttctttcctctcctcactgctctgctgacatgcccagccccacggagcagagtggccaggggcattgctcacaccctggcaggaggccttccctgctaacagtgttaataacgatgtcatttttccactccatgctgaagatggctttgtcaataaaatcaggcagttgatgaagacagttccctctcatgatgaattcacttgtcttttaggattctagccaggcagtcaggattgtcgggacctctttccccagcttctcagaagaaatcatgttcttcttagaggtatgtttttgttttttgtttttttttttgagacggagtcttcgctctgccacccaggctggagtgcggtggcacaatctcggctcactgcaagctccgcctcctgggttcacgccattcttctgtctccgcctcccgagtagctgggactacaggcgcctgccaccacgcccggctaatttttggtatttttagtagagacggggtttcactgtgttagccaggatggtcttgatctcctgacctcgtgaggcacccacctcggcttcccaaagtgctgggattacaggtgtgagccaccacgcctggcttttttttttttttacatgaaaaaataatgatgacaatgctttaatttcatttctctgagctttaattctgtattaaggactgtgctgtgttttaaattgatgatttgatcccctcaacagtcctgaggttagtcctatagtgacatgcctccaggttccacatcccacaaccagcatttgatagagtaagaatcccagtgctgtggaggaggtcctactcttcttgatcttttaatgccccacctgtcagtctcctgctgggctctctgttgcctgggaagatttctctgtaggtgttcctgtgagtttccttagtgcaggttaatgatggttgttgatcacctgcagtccccattgtcactgaatgtgattgcctggaggtcatcagacactaactcctggggaggcacttaacatcagaagtgtttattaacttgaccttgaccaattggcctccttagagctgaggggccaagaacactgtcactgtgtgacaaggactaggagccacccagacccatagagtattcccttcgtttcagcaaatctgtattttgaggctgccactgaagggtgaatcatggatgtggcgtgtctaggcagacttgggtggagaggagtcagctccctgttaacagaggactttggagaggttttgaaaggaagggagaatgttgaggccttgtactgtattcccctgatagcctgaatctgttgtcagctcttggaccttggagcaggtgacttcactggtcctgcctcagttgcgtcatttgtaacatggagggttggatgcgatgagtccagtctttccagctcttgaccttccatgtctgctgctgtctgcaacacttcccctgcctcttgccacccttgctttttttggctgtcgtctctgtttttttctttatcttgactatttatatttatacttttcaagaagttagagctaagagtgaacgttacctctttcatccccttctttaaagattccctccttggagatatcactggagttgatgtggtggttggtacttgagctggaatcccaatgggtgccttgctggtttgagattgggccgaatgaggccgtgttgtttgccatctgtcttgcctcagagcagtattttttgcagtctttgctgctttcgttggtctcttaattaaaactttgttgtgctttgcttctctggtgaaaagcaggttgtgttagtgatgatcatggggttttgtggtcattgagtaatgtggactgttgaacttcaagaaaatactgattttcttatatccagcgagcttcctagattttgtggggaaccagtgttctcatcattggaagatgtgctctctagtgtgaagcagtgattttcacatttgccctgtgattcggttgtgtttatgttgtggagcagaaagacctagccagggagttaggagagcgggattggagttgtaaggtcaaccttattgtgaccttgagccagttaactgtgtatctggtctgtaacatgagagatttggactagatgttctctgaccatcctccctgacctaaaaattccatagttctttgtattcatatatactggatgtgaaaagtccctggaataaattacaggaacaaaaatcagccaggaatggctagttgatagtcctgaaaagacaacatcattgctgaatcatatcttcaagttgaattatttatttttgaaaaaacctttctatagcatcctgagaaacttatttcttattgttgttgcttttttaaaaaaaaattgagatagaattcacataccatagaattcacttaccataaaattcaccattttaaagtgtccaactaagaggtttttagtgtactcacaaagttgtgtagccatcaccactatttaattccagatcattttcatcaccaaaaagaaaccccatacccattaggagtcattccctagtcacctgtacccgagtccttggcagtcactcatctactttctgtctctatggatttgcctattctggttgtttcatatatggaatcaaacaatatgtggccttttgtgtctggcttcctttatgtagcctaatgtttttaagattcatccaaatcataacatggatttgtactttatttctttttatggctgaataatattctatcaaatgtgtatgatacattttgtttattcattcatcagttgatggacatttgggttgcctccacttttaggctattatgaataatcctgtgaatattcttgtataaatttttgtgtagacatatgttttcacttctcttgggtatatacctaggagtggaattgctaagtcactttaactttttaaacttaaactttttaaagtcagtttaactttttgaggagctgccaaactgtttgccaaagaggctgcaccacttgacattcttaccagccatgtgtaagggttctgatttctccacatccttgacaacacttgttatgtttgtcttttttattacacccatcttagtgggtgtgaagtggtgggtttgatttgtgtttctctgatggatgactaatgattttgagtgttgttttatatgcccatggctgtgtgtatcttctttggagaactatctattcaaatcctttgccatgtttatattggattatttgtctttttattgttgagttgtaatctgaacattagacccagatcagatatataatttgcaagtaataatttccattttgtagattgttttttcactcatttgatggtgtccttcaaaggacaaattttttaattttgatgacatccagaatagtcatttttcctttggttgcataatacagtcacaaagatttacacctatattctgttttatagtttcagttcttacatttaggtctttgatccattttgagttaatatttgtatatgatgtgaggtaggggtccaacttcattcttttgcatatggatatatctagttgtcctggcaccatttcttgggaagacttttcttcttgaattctcttggcatcctttttaaaagttgatttacttctgatatatgagtttatttctggaccctcagttctgttccattgatctttatgcctatcctttatgctagtaccataaagccttaattaactgtaggccttatggtatgtttggaaatcaggaagtgtgagtctttcaactttgtttttttttcccaagattgttttggctattgaggctcccttgcatttccatatgaattttaggatcaacttttcaattcctgcaaaaaagccagctgagattttcattgaggttatgttgacactgtagttcaatttggggagtatagacatcttaacaatctatcataacctcttctatctatgaacttggaagtttttttcattttcttttcttttcttttttttttttttttgagacggaattttcctctgttgcccaggctggagtgcaatggtgcaatcttggctcactgcaacattggcctcccaaagtgctgggattgcaggcatgagccactgcacctggcctcattttcttgtctttaatttctttcagtaatgttttgtagttttcaatgtacaaatcttacacttcttctgttaaatttattcctaagtactttattctttttgatgtgagtggaattgttttcttaatttcatttctggattattcattgctagtgtatagaaatatggttactttttgtatattgatcttatggcctacaatttgctgaatttgtttattggcttttatagttttgtgtatttgtatgtgtattccttaggatttttaatatgcaaaatatcatctgcaaatagagacagttttgtttattctttaataagctgagcaccttttatttcttttttttgtttttttgagacggagtctcgctctgtcgcccaggctggagtgcatggcgccatctcggctcactgcaagctctgcctcccaggttcacgccattctcctgcctcagcctcccgagtagctgggactacaggtgcccgccaccacgcctggctaatttttttttttttgtatttttagcagagatggggtttcaccatggtcttgatctcctgatctcgtgatctgcccgcctcggcctcccaaagtgctgggattagaggcgtgagccaccgcgctggcctattgctttttcttatctgattgctggatcagttcttaatcatctttaaattcccaatgatttgcacagaataggtgctcagtaactttattgatgaacttcggtattaaaaatcagtttttatgtaagctgcagtttcttgtatttaatttgttttattctttatttggcctctgggcatgttgagaaaataggaagatttgcttgcttggtctttagttgcaaaggaagttagtggaaatgtttttgcatttgtaaatgggttttagatatttgccttgtctggccacggtgcttggtagtcactcaggaggcttagagccaggcctcgtgtgttctctgcaaccgcaaaccctttccaagctgctgtttctgctggtgagtgtggctggtgttttggttgctttctatcaacattgccttgatttggtccccacaggagactgctcacttcttgacaaaaggtaattattgagattcctggttttcttctcaccttgtaaattctcttgtttttgttttttggcaaataggaatgaggtgtgtttactactggagcatcgggctgtcagaacccgtagctttggtttgccttggtcgcagcctgccaggttgcatacttttgatttggaagaggtgccggtgggtgtgttcgctagcaggaatcacccacagtaaaaatcatgggtaggagaaatggccgttcaccttttcccatcttccttccttccattgtctacactcctggtcccaccttttccttggggactgggatgcttatgctggaacctaatcagtgtccaaagcttaaaattctcctctcctcctcacttttttcctctttgttttctcttgactttcattgccttggtctatttccagaccctccaaggcctgtgttttctctttaaaagatcctgttccatccagaggagactcaagagtcccactttaatttgggattttaggcagaggccttcctgcatctctcaagtcacacttgcaagcgactgctttggtgatgacatttaaagttggcctcctttcctaccactctgactcccctcaattttctagaactgggtttattgttctatattttaaaattgatttattatcttctatagcaatgttggaaggagcttaattttggaagtgcacagttctctttatggtcaaagcgaagtaaaggagatttgattgatcttatgacaaaattgctttagtcatagctgataggaaatctcttaagggccctgttttatttgctcttttaatttatgaaccttcttggatccttcaagcatctgtatactaagccagtaaggccttatctggaacatgcaggcttcatttttgcccctaatatgccatgaaatgctatagggttctgatgctttgttagattttggtgtaaattagggagtaacagtgtcagcaaatgtgtatttcagaaatttgttaatttttttttccaaaggaaaatgtactattagctggaataacctggcagccatagggcgtacattagacctggaagtaaacaaaatgacccccaatgaagtagaaagtaagctactataaattatagcccattttgtttccctgtaggtcagggccatgtcatcctcaggcttccagaaaagaccatgttgtgaaataggaacaacagagacccagtgccctacagctaaggccaatgggagggaggggaagagaggagttagaccagcttagaagggtgggggcccccttctactctggaatccttgcaggtctcactaagccacagcagagcatgtttattgatgttaggttggtcattaagaatagtcaaaatcagcgtcctctgatttggtgcgctgggatgcacgtaatccactgaggatagtatccatgaaaatagtttttgaactttgctttataaattttgatgagcttgagttcactgagaaaattaatttctgtagaacaattccttcatttaatgttggcccaaatgaagcatttagtatggaatttgggccttggtggaattttctgggacacgtagcctaatgtgaggacaaccattgctgagcagtgcgagggaagggaggattgcctagtgagtgactggtgccgagcaagaggcttcctgcttgacctctgaatactctggcgcttcctttttggggtcaggaagcttccaaatccagagatccccctgtttgcagttcttagttttcctctgaaacccccacaccagactgagtgtgcctagggttgggactaggtattacttctctttgaatcccaacatgatgcctagcatacataattctcagaaaatgtttgttgattgtcaaggtccagctaatcttgttgatttgtgatttcatacctttttctttcaaaggattgctgtatgcctggaaataaatccattttggtttgcaaaatcaaggttgtcgtgtcatcctttgaaacaattagagaagcaggaaaatcttctaaggatgatcgaaatctccactctataaaccatcccaattaatatctgatttcttctttgaaaaacataatcatatcctttcttctgtagaaccttccctaacactcctcatttatcagaacaaatttctgaattcttgaagcaattagtttttgactcactttatgtgtccttttttatccatccatctgtccatttatctgtctctgtccatccattgatccatctttgggacagacctgggatgtctgtgctcagaagcagagtgctctacatctgggaagcacagtggtcgtgcccacagctgtcaggctccttgcatgctgggctgtggtcctggcttctcttgtcttctgtagagtgggagtctcaccaaaggagggcatgggagggctagcttgagtcaaggtgcgtaagttggaacattgcagatggggttcagggtacccagggttgtccctgtttggtcagggcagggtcagcaaagctccagcctgtttttgtatgcaaaaagtgtaagctaaaaatggtgtttatggtttttaggggttgtaaacaaaatcccagaagaagatgcaacagagaccgtgtatatgcaacctgcaaagtctaaaatatttatcatctgctcctttatagaaaaagttgtcccaagcctggttagagctctgagtgagtgtgggtagatctgtctcacagatctactctgtcccagagtctgtctcagctaggccagaatactgagttgtgaggaaccttaaagacacttgtctagtggtctgtaggacgcatggccctgtttagacattctgcttggtatggtgacccagggacctgctgctggtagaagcagccttttcttccccaggaaatgtatactaaatgaaagcaagtactttcaccttttcctctgtggtcccgattttacctctgaggtcatgagtaagtccaggtgacaggtgggtcagagctggattatggagggctgagcatgtcagttggaaattgattcagaaggttgtggggaaatattaagggcttttgcgtaggggagtgacatgagcatagctgggcttaggaagtctggcctggcatggtttgggatcctgggggagatggagcaggctggaaaggttaggggcagggagaccaataggaagcattggccactgccgtgggaagtggttgtaggggtctggattagggcatagggaatacaaaggaagggacgtattccagggaagttaagtggcaactcctcatcttctagtttgtgctgtcaccagggttggttggtgtgtggctggcacactcaggccggccttcccccttcccttcctcctttcatagagcaactgctccataccaggccgtgggttctgcggagttcctgcctggaaggcgcccatgagctggaggaaaggagaaacaatggttctgccagggaggagatgacattggataagctccttgaaggcggaggttgtgtcctgtgtgctgcctcatgcgagctagtctcaccctggggcacgtaagaggggctcagaaggtcagttgtttgaagtcccacagctggctggccacgtagacgataatgctgtacaccagaaatcaacattataataaaactcttaaaaatccaatcttatctctacttttaaggaacctaccatttacaaataaaagatcacccacttatttattcattcagtgtctgttttctgtaaagcacactgtatggctgtgtacccttatgcacagtaattgccaaaatgcctattgcagggagcggggtcacctccctgaggccatgcagaactcggcatgggtctactttccgcccctcttgagcttttatttccccaaatacctttgcctcatttcttgatctgaggatgttccataatgacttcaagggcaccttccagcttggggattctgtaattttaaagtccagcttgctgaagggctttgtggtaaagggggagttgggaggaagcctcactgaggttgtcctgctctggatgctggcctctgcacaaaggtcctttcaggctgccgtggggaggactgtcctatgtcacttcttcttccctcttaagccctggaggggaggacttgggaaacaggtcacagggagcctggaaaaacaaagaacacgccgtccgtccactcaaaacattggcaatctagcaaacggtgtgctcttccctggcctaacatcatcggtgtgtgatctctctcccagcactcacccagggaccagaaaggcgggaggtctggagagagattgcaggtggcttccttggtcagtcaggaggcattcccttctcctgcatgctggaggggtgcaccatgggcctgggataggctgttgtcagtggagcagaggtgtcgcccagccagaagggtaagggagctcagatccagtccaggtgttcgggtcctgctccctggcgagaaggaagtatgtgtgagagagtatttcagatcctcctctcctgtggctctggaatcctgctcatctgccatccggcgtctccagccctgctgtgcttgagaagtcttcatttctcactagcagcctccattatctccacttcctccattatccccacttcctacattttcagggcacttggcctctgctgtaccctcagcccccaatcctaagggcatgtgctctgtgaagtgggggacttggggttgtgcgcccctgtgccctgcagtgcctgacgcatgagtgttgtgctgaccctccctcagtgtcgttcagcagtgagcctcctctaaagcaagttcaccatttacacggtggacttgtttcctgtgtttgtgttcttatttcctaaaaccgaactgcaaactcctgagggcaggatctcttttttctttttttaaaataagctctcatttgtatttatacttggctattttcaaacgctattcgggtgggacagggctcatgcacattttacagctgagaaacagcatcacagaggtttaacggctctgtaaaataagataattggtaagtagtagccctgagactttaaccaggatcttacagctcttgttcaatgaatgatctttctgtaacccagaaccagctgagtatttgggaggtcctcagtaaccgttttattgagttaaaaaaatatgtgggtaaggtatttgtgagtacacgtgcatatacaaagattctatgtgcttagaaacttctttgaccagcctcttcatttgaaaagggatttcaaggttcatatatgcattgtttgttgcatgttactttctttggaaatgactagtgaggacagataacttagaaatatttgcatgttacatcagaagagagttaatagtactggttactgttaatactagtggtattagctgttccagcaaaaggtactgcttatttataataaccagataatagcagcgagatcggagaggatagtctagataacattatgagtgtatctataattataattgaaatggaatgggggtgaatcttttaatatgaggttttaagaattctggaattttagtgtgagacataattcatggtgtatggttgatagggacatactctttggccatataaccttgaagaagtaataatcttgaattatttatcattggaatgaatcatccttttgagagaatcatatcttccttcagtgttaaaaatatacttatgtcatctgtcatggtgagtattccagttacaatgcatatttctttttttcacatcctgcctactcacttggtgttatccttgagaagagaaagatttgagatgatggctaagtggttcccagtctttgagtctataatcacattccctgttttttcgcattccttttggttgctatgttttggtatttggtctttggtctctttctttggggaagagtgattgggtggccacaggaggagtaaacccatttgggagctgatagttgatgtatttttgttatgcttggcagagtgagcggcccccatcttcctgagcagagttcatgtgtgatatacaaatgaatggtctctttccatctggccgtcacagaggcaagaaactgtggtgcctctggatcattgaatttctcagactctcaagggacagcagaatgcgtatgtgaactggcatacccaaatgcaaattatttctggtgatacctaatatatgtaaatgtatgctgctcagttggccaagaaattatgaacggcactcttcctaaataatgctatataactgaaattttagttttattgtcacaatagtgaagtgtgttgatagtcctatttcctgtcaaatttctgtgacatttccagcagcttcaagcacccctcacgggccaactccccagaggtggaagatccggtatctcaggagggagtgctgccgggctccattccgaaagccacacctgccttgttaccacgtagggatctggcagttgaaggctaggggcggaaagtggacaatcaggatagagacaggactcggcagagaagcggagttttagtacagatgtactaaacatctgtacagatgtggagccccccccgcatcatcacacttaacttcaggaacaaagaaacccaacagatttaaagatagtagggcatacctgcagggctggtggcggggcaggtggccggtgctgcttccatggtggacttcgcagttgccctggggatgctgacccctggactggactttgctcagtggtgcccgccacagtgagcctcagccccacctctgttgtcttcaccctttgacctcacttgagcctggactgagggatttcccctgtcgatgaaccaacctgagtactgtgcatccagcctctcactgagctgggaaccaggggcagctacaaaggagacaggagaaatagccgtcccccttgggcactgctggcctggcaggagaggcccagcatgtgtctagggaggagcggagcggttgtggccagcattgagctggctgcttttctgtaggagcctgaatctcagtcgagcctggaaggacatgcaggtgttagggagccaggattgcctgcgttaggcacggggctgggcacacagagcactggagggaattggttgagtaagtgatggagtagttgatagcaaagggagactggagagagcattctgcagggggacaaagtgcctgagcctaagagggggagacaggctgtctggagaacatgaagcaagtgcctggccctggaggtgtgtgcccctcctgtcccctgtaaattgtgggtgggccaggctgttgggggcatttgtgggcctggagtgatgctgatttctgcagccctggcggttgtcagtgtgggctggggtagagatgtgtgtttgtgtatggagcaaggaaggtcctagccttgctcaagaggtaaagaagctgctggttgagaacagcttcatgaattctgcaagaagagatgatgatgtttgcttcttttacatactgcattaaaggtcccagacactggggcatttgctgatgtcagtaaagagggagtcctggatttctaggcactcacagtttcagaataaacacatatgtaaacagctgattaccatatggtgtgataaatgtgtcaggatacagaggcagttgctattggcaacaccaaatcagtcataaccttcaggagtgaacagggcttgtttgctcagggtctggccagggacccagaggaccagtgttggggacccagaggggctgcgtgggcctgctgccactgcgagcctgtgttacaagactgagcagtgcagccgtgactctggcaggcgagtttcccaagccgaggtttctggaagccacagcctgagcccagggcctggaacctgcaggcaaaaactgtgctgagactgattccccagtggtcagccccacagctggactgcaagctgctttccctgggcagactcagcctcctgcaggaggggtgtgggagggaaggagcagtatctgtgtgcagacctgggttcccccagaactgagatgctggatgaggtgcctgcatcccctgagctgcttggcgaggaggacggtccatgttttccatcacagctgggagtaagagcagatatgtgcaaggcaaggacgttgtttcaccttttgaaggaaggttgttaggaaaacgcctgcattttctaatcactggagaagcccttttaagcagaccagatttataagggttttgatgaaaacagtggtttgggagcagcaatgtctttaatagcaacaaagcccagagatggggtctgcctgcacaggagcatgggccagggggtcctgtgtgaccttggaggtgtgtgagggaggccctgggctggttccatggcagggcacagtccagcttcttgcttcctggcagcacaaacccctgcctgtttctggcggggagatgctgcccaggctcggctgctttgcggttctatgtcggtcactttccccaggccacttccttcctttttcttcttatgccagcctgggcaagaggaatttgtgcttcctgccagcaggatggatgggggaaaggcagtggctgggtgtttctctctgctggaagggtttgctggggtgaatcctttcccttcactccctcctgtagccaggaccttgtcacctccagggagcaggtgacagtttccttgactcctcaccaggttttcaggctctgccctcttcctctccccagccaagcttgcctctgacctcagccaggaggaacttgctctagggcttaagtcaggtcacatctaactttaagacccagttttagcatctggtatggaggcaacagcctgggctttgacagacttgggtttgcgtcatgactcggtacctgctacccgttcgctgagatgccagtgagcagtcgctggtcatgttacatagctgccacctcccggaggccagctctgttgtgtgtgcatgcccattgagatgcccgggtgccgccacacccctagcctgcgcctgcctgttcttcctcctgtcagagggccctgttcttgctcatagactcctgcacagcagcgggcctgtctgtctgcctggcccttgggtgtccctggcatctgcatgctgtgttcccatggtccttctgctagttggagcccttgtgccatgccttcctttggagactctcctctctgtgccgtctcgcatgccatccttgaggttttagctctgtcacctggcagcctggcccttccctgcagcaggtgaggactgagagctgggctgtgcccctcccacccacttgacccagcggacactttgggaagtggcaaccataagtctgcctggcttgctccagttgcccatcttgtcctgtgagtgaagctcctgcttccatctctcttgatctggccccttctctccattcctccagctgcagtgggtgcccctgtcatttgtcagccagagcattcaacagcctctgctcccactgaggtcatggtgattgtcttaaagatttgctctttagcttctcagctgaagacacgttggtggcttccctgaccttttggaaagtaaccagactctgggtccttctcctttgttgacctggcccctgcctccctcccaccccatctcatccatgcctgtcctctgtgtcaacacgcctcactgccctgcgcccgatccttttacacaggtggtccctctgtttgtagagtcgccctgctcttcgtatctccctgcctgttctgtgaagttcagcccagtgccccttccttggaggccacattagagggccctcctctgctggctttgtgcccccgtacccctttcgcagctgactgtccacattatactgtctgtatctgttatttactgtctgtctttgacaaactatgatcttggaagtgcagagaacttgtctgatttgtttaaccacctcacttagcacataacttgtcatatttttaatttattttctatctccccttctccccattagatcataagcttcctgggggcagggatttttgactcttacttagtgatgcatcctcagcacccagaattgcactggacacatcatatatgtttaatatgtgtttgttgaatgaataaaactgacaggcaactacagcttagattgcagggagtgagacatgctgttgccggagctctggtgtcattggttcatagaaagcttgtttctctggccatggggacttgattcttagagggtaatggttcgaaagttgaattagtgagtgtaaatccttaaaaaagtaaaaatatgtttgtgcccttgtacagaggggctgccttgcccttctggaagaaggaattccacgttagacgtgttcccagctgcagttttgttctgtatctattgccagcaggaatccaaggatttcctttattatttccaaattgctgcctcttaggaatggagaatgctgccagtctgtgctctgtgttttttttgctcagtgggaccaaagtagttttgtggtagagagatacagagatacggctttgagacagtttgagtcatctaattactgtccaggagggctgggaggttaaccctggtggttgctttggtgatagtgatcgatgtctgtgtgacaattataatgaaggctggtattatgccgggactttgaagagtctatcagatagtgaaggaattgcgaagccgtactatgttgaggtctccagaataaacatcctcagaatggaaggtccagatgagaaggttaccttgatgagaggcctttatgctttttgtgctattttcctttatgggctctggtagttctttagtgttttataatctcttttcagagaaagctttttgtaaattcttcagattttactttttaagtaacacttacaaaagttgtatggtggcttgggaccaatacactttgcaggaaatgcagagatggataagaaatggttcattcccttcaggacctctcgttatagcttagcctatgtagtgattagagcatctgctttgaagccagctggacctggactcagatataggttttgctaattgatacctgtgtggccatgggcaaatatgctcatttactcatttgtgtttaacaaacacttatattgcacttactgtgtgccaggcagtaagtgcttaacacatgttaaatggatttaatccttacaacaaccctgtggctaggtactgtcatcatccccatgtttaaagaagaggggagtgggctgggcatggtggctcacgcctgtaatcccagcactttgggaggctggggtgggtggatcacctgaggtcaggagtttgagaccagcttggccaacacggtgaaaccccatctttactaaaaatataaaaattagctggtcgtggtgacaggcacctgtaatcccagctactcgggaggctgaggcatgagaattgcttgaacccgggaggcggaggttgcagtgagtcaagatcgcaccactgcactccagcctgggtgacagagcgaagctatgtctcaaaaaaaaaaaaaaaaaaaaaggaagaggggagtggttcacagaggtgaagcaatgttccctgggtcactgagcagagaagtcacaaagcctgggcactctggctcgagttcatttttcttcttgacgctatttgtgctgcctctcagcttcctaagcttgagcttcctaaactgtaaaatgggaggcagcaataaccagactgcctagagacaggctggtgtgagaattcagtgagaaaacccggggagaacatttagccagagcctgtcgcatggctggggctctggctagtggagggagaggagacagcacacagattgcaccagaacaaggtaatggcggcgcgtggccttgcaggggccttgataataggaggagctcagaagcagggagagatcacttcctgctggggcagctgggacattgtcatgaaagaccagggaggggacagatgggacatctgggacttcacagccacctggggaagtgggcactatccccattgtgtggatccagaagctgggctgtttctaatcagttaaaatgagtaggtagagccaaggtgaaggaagatggatttactcagggttcagttggttggactgttgaattgagctgggggcaggtggaataaagtctggtcagccactctggggccgatgcacaggggcccagcctggagcccacttccggccttgcgaatgcttcagtggctttgcatattgtctctttgttctcactctttagaaatgttctcccacaccttccttccagtggatttctagaaataccctatttttcatgactcaccaattgaacacatcctgtttggggaagtgataagagaggaatttgagaatggcatggagttgactcctaatgatgactggtgcaaggagtagacggcccagccttctgcttgctctgcctctcacctgtgtctccagacgagctgaatttctccaagtgccgtgtttcactgtccccgcccgacatatgccaactggagcttttcctgtcctgttgtaggcggggatctgtgtgtggctacagagtgactaatggtagaattaatcgagttagagatggggcctgtagttttgaacctgatgagttagatgaccttttggaccacacagatggctggtcgtcctgtgcaccagtgtggcagggatggagcttgtgccagctgccccgggcagagttgttttctttttaagaggtagccaaggcagccttgcctctcaggacccagccctggtgggtggcaccccagcccttccctttccagggctctgattttcctcatggcttgctgttatttcactcgcagagttcagatgttgttcattccagcagaggccggatgtgtaaatcatcctgcagcagttctgtcttgtatggccggaggctccttggtgggctgattggaaagcccagtacattagggagtgaagggagtgaagtaaagagaaatggaggagggagaactggagctggggcacgtgagctgctgtggtagcgtgcgggaggcaggggagttcagaccacgtctcggggccaggagtggctgacagctgaggtgtcgggctgggtagggcagagtgagccgcatggcctggcagctgtgatgggaacatgtaagaagtggtcaggctgctgttgttttagatgtctgaaccctgagggtagaactcggagaacttggttggtggatgcagccggcaatgccttcccatgaatggcaagggcagtgggcttaggcagatggagctgctccacctggcagtttagcctcccaggggacttctggcaaggtccggagtcatgtttgatctgccaggactggggactggggtgctggtggcatctggtgggtggaggccaggatgctactacacatcccacagtgcccaggactgcacccaccacaaagaagtaccttgtcccaagtgtgtccgggcctgatgttgagaaacgctgggtcaaaaggcttcaggtgatggtggacttggagggccggtcagggagggacaaagggatgtccttggcacctggactgctttggggcccctgtttcctgctcttggtgggcctgagtctctctgtaagttttgcagtatgaagttgacctggatgtttcataagcagaggcttgtaggtaatcaagtgccacgaagtaaagatcatttcgggccacttgaatatattaagttcgtcgacatcttcaaagagttagattgaaatgctgatcctcttatattcctgacatattcttatccttgcctgtattatttttttctgttttttaacctgtgttgtgcagtatgccagatgaactttttagggtgtatattttgatatcttacttttatgaagattaataaaattaaaattgtctctgtactgatgtaaagagcttgaacttaatttagttttataattgtctgtataaacattcttaatgtctaaagaggattttttaccggagaggcaaagggaaataaaaacttgataaaatttaaaaaattaaaagcaactgttatctgttattgtatgtatgtatgtgtaggtggttgtgtgtatgtatgagagacacagacagtgcattttacttttttgttttttaaagatcctgcctttaaatttggaactataattatttgtcagcacagttaaattttttttttcttgcttttctttctctttctcctttcctgtgttggagcaaaggtgctgtgtgttgtctacttcaggtttcttttttgagtgaatgggacaaggacagggcaatatctgagtgtcagaaagatcccccccgaggctggtgtgggtaccaggcagggctggggtacggagacgggcaggcggaccaggcaggggctagtgaaggcaggacgaggtccaagttgaggccatggccaaggggaggggaaggcaggaacagcttggagaaataggcaagagggacaagtctctgacctcttggctgtgcgggctgggaatccaggaaaacactggtttctggcttgagtgagtggaagcttttttaaaaaaagagagttaaaaaaaaaagccctgttttgtacacattttgatggttaatgttgctttctgacttttgcttttcaaaaagtgaaaatggaaaagtttaacagggcctcaactcctgaggctggattaggacatttctcatttacattgtgacttttagatgaaaacataattgatacctttgaaaagattaagatggttctgcctattttctgaaatttaggaagcacccactgggtcttttggtctttttttttttttttttgacagattcttgctttgttgcccaggctgggatgcagtggcatgatctcagctcgctgcagcctcgacctcctaggctccagcaatcttcccatcttagcctcccaagtagctgggactacaggtacatgccaccatgcctggctaattacttttatttttattttttgtagagatgagggtctcagtatgttgcccaggctggtctcaaactcctgggctcaagagatcctcctgcctcggcccctcaaagtgctgggattacaggcatgagccaccgtgcctggcctgctctggttgaaggctagattctgagcgaccaggagactgagtcttttcttgctcacctggtggagtacattgtatacagtaggtgcccatgtttcttcttttgatttgcagagcagttgtcttgaggaaaaccagtgagatgatcccatctcttcccatgattttgagagtatgatctctgtcccaattcagaagagccctgaggtgaggtaaagatgttagaggtgagtggcattctgtgtctgacctgtggctccagtgtgtggatccgtgggctggcgtgtctcacatgtgtggactggggtttccctcttccacagggaggtggtcagtgtgtgggaggagccatggctctggcctccgactgctggggtttgaatttagggtgagcacttactaacactgttagctgacccgctacctactgatcttcacacggatgagcttattgatggtgcacacagatgacaggtttagattgtatgctggttccttgtatttgttctgtttttaaaacctcagctcctctagtctttggtagacactcttatgttatatcttgggcaacttagttcctctttctggagcctcagtttccccatctgtaacaccagagagctggacttaggggaaccgcttgatatttgacaatactccaggcttttgtaaacaaattgtccacagctttgctgagctacagccacatccgcttgaaaaagcattgtcttaccagcctgtgcagaatccagatcactttcatccaccttcccatgggggctgctccatcccttgtcttactggaaatgtctttctcaagggtcttttctggtgtacaggtctccctggagatggaaaaccatagcactggtttaagtacagtgttttgtttgcatggggaggagaggctgaggcaacagcctgtgagttcaggagtaataaggtgtttgtttccctttttggccagtttttttttggtggcataatttacatacaatgaaatttaccctaagagtacactttgatgaatcttacaaatgtacagttgtgtaatccccaccattatgacctaaaacaccccgaaagcttccctcttgctaacctgactgacttggtggttctggtggcttttttgtagattgcctggcatttctacatagatgattttgtcttctgtgaacgctgtttgcctccttccttcctgatctgtttgcctgctcctgctttctcttgctgtactgtgttccctgggcctcccgcagcctggaggggtagagaaagagtggcctcctgcccatccctcccagcccctctctgtcccgtggcgttagcagcaagcgctttgtagctgcctgttagtgggttgccttctgttcctagtttgctggtttttttgtcatgaatgggtgtttaatttcatcagatgctttttccgcactgactgagatgaccatatggtttcccttttttagcttgttagtgtggtgaattacatttttaacactgcaactactctttggtgtggaagccttatgtgtggggtaagcacagatttggtgtcatcatgttgggatttgaggattagctgttctgcacttcataaggatatagtacattcagttattgacagcagctaggctgtgtagtcactcctgtggggctgatttgtttaattatgattgttgacctttttactctttcattatattttgggtagaatgaaatcatgtgtgtggtgatggaggggtggtggtggggggagataataacaaactcttctgtagcctgaactcattacttcttataacccataggtgtaggtaccattttctttattttatgaatgagaaaattgaggtccagcttcttggaaggtaagagaaatgagtcccatttcccctaatattaaccgagcaccatttatgtgccggccatttggacccatctaaggggcacaaaaccattgttttttgttgttgtcgttgttgttgaaaccactgtaatggcagcatctttttttttttgttttagatgaggcctcactgtgtcgcccaggctggtcagtggagtggtcacggctcactgcagccttggcctttctgggctcaagtgatccacccacctcagcctcttgagtagcttggactccaggtgcacaccaccatgccccagtaatttttttgtagagatgagtttttgtcatgtttaagtgactttcccaaggccttgtagctggtaagaaggaggtcttctgtttctaagttgaattcttttccctgtcctgctacttttggggtggtttatggaaagaaattaagtcagggtgaaaaaactagtcaacttcttagagcaatgtagataagattttcacagttgatcttcacagacttatctaaatactgaagccccattatccctggggggtatgttccaagaccctcggtggatgcctgcagccagctaatattgaactagtttgccttcaatcacgacatgtctctgttcatgtcatgtcttcctcccataattttttttttttttttttttttatttgagacagggtctcactctgtcacccaggctggagtgcagtggcgccatcacggctcactgcagccaccatttcctgggcccaggtgatcctcccacatccacctccccggtagctgggatcacaggcatgcaccaccatgccaagctaattttttgtagagatggggtttctccatgtttcccaggctggtctcaaactcctggactggagcgattcacctgccttggcctcccagagtgctgaggtttcaggtgtgagccaccgtgcccagcccctcccaaaagttaatgatttttccatcataactaagcacttgccacgcaccacggccgtagcttttgcagtttgagatgtgaaggcaaagctagcatgagtttatttttttcttctttaccatttcatgaatagaagacccacttttcccttagatcttagcaacctcagcataggaatttttccttaagtcaaggagtttcatctttttacttaaaggaagtgctgtatgatttctccttggcatatctgcattaccagcatctagggttcttgtgctctgggaccattattatgtaaaaaataagggttacttgaacacaggctctgcaatactgggacaatcatctcataacctaggcagctactaggtgactcatgggcaggtagcatggaccttgtggttctgccagacaaagggaggagtcacgtcccgcgtgggaggcaggacggtgtgagatttcatctcttgacatagaacagcaagcaatttaaaagttatgaattgcttatttctggacttttctgtggaatatttttggactgtggttagtggaaactgtggaaaatgaaactgtggataagagggtagtactgtatctggatgagtccaaaaacacattctaagatgaaatattattagctcacatatttatcttttaggatacaatctttcttaatttagcatgtgtgctggaagatattttgtcagtattaagtaatgctgcagaattttggttgaactgttgtgcatgtagaacattaattctttgttttcctgatagtttttggtgagaggttttctgggaagtcattgtcctattaccactttgcatgctaaactggtgcgattatgagttccttatccatatcagggttggggatgtacatacatacatgaaaatcaaactggctgggtgtggtggctcatgcctataatcccagcacactgggaggccaaagaagcaggaggatcacttgagcccaggagttcgagaccagcctgggaaacatggcgaaaccccatcttttacccaggcatggtggcgccgtgatcgcaccactgcactccagcctggagtctcaaaccaggctcaaacaacaacaaaaaactaattgctttaagtaaatgttcatgcctcaccaaagatatgtactgtaattttcctattgtggatatgtatattttcaactcctccaacattagtgagtatatgccagacactgtgctaagtcaaggaaagcgaggagaaggaaagggatggcattttgatctggacctgaaaggttgaatctaataagtgagaagagaactcaggacctggcaggtggaggattacatggttgcacatgttagggtcccaataagtttaggggagcatgttagacagattaagaactttgttatcaggcggacacatgtgaatttcacacctggttttactacttggtaactgtacttctgggcaagttggttagcttcttcgagcactagtttcctcatgtgaagcaaggaggagaaggcataacatgtacctcacaggcgttcgttgtgtttgctatcttggaagagaggggggaggtctgtgctctgtgctggaatgaaactttttttttatttggccagacagtgatggtaggcattctttggaccgtgatcttaggggcgcatgctttggcggtttacagatagagatctgacctggtccatgggaagtgcagattcagttccttgctgacactgtcaggagctcttccatcacctagccttgtgccagcacactggtggtgcttggtaaatgtttgttgaataagtgcactaaggtttcactgtaacctctagtgatctgcttctagaagccttttcttctggtagggtcacacctagaggaattggatgctacaaactgtgatagacccagtaccatactctagctgctgtgtctagcttgacagggatgggcacttgcggtgccctcagcctggcttgaagttgacatcttgtattgggcggtgtgtgggctctgttccctgagtcttcatcctgaaactgctggggctgatagctggtcgcgggatcacctttcaaaggaacgcagtccagaggcctttgcttcctcaggatggattcaaggagagaatcctcagctgatcatcattttatcccattttttctgtttcctttactgttccaacttttctttcttttctcacctcctttatggaggaaaattgccgtctggggaagcatgatgctggggaagtaggttttgattgtccgatgattgtcaggtgagactattacacgtgttcagaccattgggtgtaagacattggtgcacattagctcctgctttgatataactgaggcccagtaacaacaaatttttgctcaaaaaaagaggcataagcagcgttgtgtgctttctttattttggcctaccctgcatgatggctttaagtattatcgggagaagaagcatacggattaacaaagatgtgtacttcactttccaagaacaggaatgttttgccctagtgagccttgaagattttttgttttgttttgttttgtttttttgagacggagtcttgctctgtcgcccaggctggagtgcagtggcacaacctcagctcactgcaagctccgcctcccgggttcacgccattctcctgcctcagcctcccaagtagctgggactacaggcacccgccaccacgcccagctaattttttgtatttttagtagagatggggtttcactgtgttagccaggatggtctcgatctcctgacctcgtgatccacccacctcggcctcgcaaagtgctgggattacaggcatgagccaccgtgcccggcctaaagattttttttataatgtgcatttttgtccatagattacaatcactgttgtttaggaactcagacggaaaatgtgactgagtcagagaagtaactgttaaaatacaactttgcttacaatatctgctttctgtacgtcaggcagatgaattgtattaaaatacttcctaggtctagtttggtggaaaccaaagatataactgtatttgcagggagattggagaatgagatagcgtttccacttacagaagcttgttttatcttacctagattaagttgaggcagaatgcatgtataaccagggcattctggtacgtagtcactcattcatctgctcatttattcagtagcactttgcttatttactatgctagttgctgaggattctaaatatgggccttccaggactcacagtttagttgtgagggaccgatataagtaattaggaaatagtgtagtaaaaatagccagcaatttttgttccctccccagaataaatgtgctgtgtgtgtgttagtttttatgaaatatgtatatgaagttttcttttgggaattagtgggaacatgatatgtatataaactcatcattaaaataatttgaatatcagctgggcacgttggctcataacgataatcccagcactttgggaggccgaggtgggcggcctataatcctagcactttgggagaccagtctgggcaacatggtgaaaccccttctctaccaaaaaaaccccacaaaaatttggtggcacgcacctgtggtctgagctactggggaggctgaggtgaaataatcacttgaacccgggaggtggaggttgcagtgagccaagatcgcgccactgcactccagcctatgtgacagagtgagaccctgtctcaaaacaacaacaataaaaagaatttgaatatgttcagactttccaccatacagtaccttagcaaggtacactgagattaggaataagttaaaatgcttgtctttggaagattaagtggatgttaatctaagcaaagtggattctgtaaaaccctgaaagaagtttttgagtttcacggtgtgaacagaacagagaacccttgatgagaacacatgcgtagctcctagcacagagtgtgcgacacagttaatgtccacgggaagagcttgacacaaacttaaataccaaacttagttcagaagcacttcgcattaagctcctgtgcctcagtggcctggcacttactggactgaaggacagaatcactaacctgggcttttactaccattgcagcccagtgccagtgacacttagggactcttccctgagcaccttcccaggtacccagaagtgtttgtaggaagaacaggagatggatttaatgtggatttatttacagtatatgagaatacatgatgtgaaggcaaacccttttcattagatcctttctgaggcatcataaaaatcatggttttatggtttttatgatttgagtctaagaaaacttagttacttagcctttctgcggagaataattgcttatttgacagggtgacacgatggtgtgtgagctcagttgcttttagccagcactacttgaagtcctcccgtcatataaaaggtaaaagtctgaatcatgcaggcctaggtttggttgtgaacttttacctcttactggtagtgtggccttgggcaagtcactttgatacccactttgtaggactgcggtaagaataatattgttattaatagagattccaggaacttgtagcttgattttggatgcagagagctgggctcctcccacacaggagcttctggtttgagaaccacagctagcaatggctttgttgaggagggtgttggtgtgactatcgaattgtcagtgccagtgtgttgctgccgtggctgttgcatttgaatgggctctggagacacctggggtgggtgggggctgcctgacacggagccagcctgcctggccacttcttcggctctgtgcttacttgggggcattcactgtgctaggtgtggagggttctataaaaacaaaccctaaaagattagtcatacatttactgttggtcatttctcaaagtgatgacgttaccttctgtaacctacacttagtttctgagtctttttggtgtgtgttgctcgaatatcactatacatcttcctgacttctgaatctaaaagagcaccactctttctctttgtttcttcagtcagaaaatacctactgggtgctggtgctgcgtttgtgaacagagcacacagaaatctgggcctgggggcgcttgcaggattctgcttgctttccttcctcccgtctctgcagtctgacgctgtgtgccatgcattagtcggttcgtcgtctgcctccactagagtgtcatggatgctcctgggggacagagcctttgttttcttcgccaccagatccccagtgcccagagcagtgcctgggacagaacttgttctcaataaatagtttgttattgttgttgtggggcttggatgcaagaggagtgagccccacatttgattatataataattaaaaccttaaaaacaagcatacgatggggatggctatctaagtttagaaggttctgtgaaaaggacaggagggtggtgtgaccccgttgggggaaggagctctgtgttgactggcaggagccctggtttgggagtgttggctttatccctgatcagctgcttgacttcaggcaactctttacatttgagtgaaaaaatgaatggggattctctgtatggtttctccaaacccgtactccttagacatttaaaacaggtggacggaaccaacttttcatttcacctgacttctcagtaaccacttattacactgagcaaactagtgtgaaaattttattttatttttaaattttttacagacagggtcttgctctgttacctagactggagtgcagatcatggcccactgcagcctcgacctcctggactcagtgatcctcctgccttgttctcccaagtagctggagctacaggtgtgcgctaacatgcctggctaattttttaaaacaattttttgtagagacggagtatcaccatattgcccagactggttttgaactcctgggctcaaacaatcagccttggcctcccatgccaggattacaggcatgagccaccacgcccagccccacctgtgtgaaaattgtaatcattcacctgtgcataaagttgcatcctgcattcagaataaagagaaccgtgagaggtcttcaatttagtcatctttactacaactttctttccttttttccttaatgctcttgatctttcttgtcacatctaaatggtttaatccattgtggctcgatgtgggagaggctcattcctgggatactcctggcttctacacaagcctgtgtactgctgcatgtggagaaattgtccaggttttttgttttgtttgagacagagtcttgctccatcatcaggctggagtgcagtggcatgatcttggctcactgcagccttgacctcctggactcaagctatcctcctacttcagcctcccatgtagctggggccacggtatatactaccacacccagctgattttttaatgtttttgtagagatggggtctgtgttgtccaggatggccttgaactcctgggctcatgcagtctgcctgccttagcctctaaaatgctgggattataggtgtgagccactgtggccagcctgtccagtaatatttttaattgaggagaaaggtcttcttcctgacagcagtctgtctgctcgtgagttttgacggcacaagctgcatggatctggtattggggtggcagcagctggaaatcctaatgaggatgaactcttcgctcctcaattaaggagactgacttgcccttcaccagaggctgctgtcttggaactgctcccagtccgcagatgcctagggagtcccagacggtccccggtcctcatttgcacgaggcgaatcagtttagcaatttgcctgcctaataggatattgccctcatggaccttattacctcatgcgctgctttcggtccatcgtctagctttttgatttgagtgcttctgtggatttgctcgctgcgtctgttattatagaagggtttttaaggcagccatgtggatgggcagtgggttccagggttcagatcctacctctgctgctcactagctcagatgtctttggtcctcagattcctcattctgaaatttgggaatgatactcagtcattaattaagtgaaacagcgtttagaaagcgcctaggctggtgccagacgcggagtaggtgttcagtgaatgcagaagctatttctgttattttttgcacttgctaacagttcctatccttagatagtctctgtctttaaacttcatgtgcctcgggtttaaaatctgctgctaaactcagctgatccaggaaactgccactttttggccctatttcccgctctcctcctctgccccccacactgataacctctttatgatgtatcctcccagctctcaggcataattatgctccacttatccagaggtcagacttttagcaacctctgccatctggaacatgtccaggaactggaagtcaacagaaaaggccttggagctcagctgtcctcgagtctgggacagacgctaggtggagaaggggtggctgatggaaggggggcggctgacagcagcaagagatggcaggtgacccagaagacgaactcagcagagcagggccatcagtgtggtggccagcagttctgcatcccacgctaaccacggaggccacgcaggcctgtgttccgagtgggaatctttggtgctcccaacaatactgagtatttaagccaaattatattcagcatttgttaataaaagaggaaaatacaaaatctgttttataaccaagatggtttttagaaaaccctttggtatcttggtgtcatttttttttttcttctgggtaattagtgtatgtgtagctctttatttttcaagcatggggaaaatgccagcgtagagaggatagaacacgggctttggagtcgcagtccagggtgtgcctcttgtttattctgccacctccttgctagttgaccccagtgagagtcagcgttttgggtctcggtttcttcctctgtaaaacctcagaggtgtgttcagaataaacacacctagaactaggcaagacgctgacggtgaggtcttagatacccaggccctggctgggcatgggaattcactgcttctactgtttactctgcttgtaactttcactcctatctaccagccatttggtaaatttccttacaccatttgacatgtaggttgtatatttcaattagatggcagttctttatggccagggaccctgtccctgaacctagttttttagtgtctctgaagtcttcctgatgtcgactctgatgtgagctcagtgttaggtggcaacgaggctggctctgtgtctacctgtcatggaagctctccatgtccccaaatccagaaggaggtaatttgtgtaaaataatgctgtcctttaacttgcgtaaattcctcccaacccgaatacataggatgctagaattttaggtctagaggagattttattttagcattctcctggacaaattgcatgttttgtggctgggctgggcatgtaggggctgagaggctgtcttgtggctgaggccacacagccagtctgtggtggagctaggctggccctcttggggcctccttagctccagtttctttcctctgtcagacagcaatggcctcatgtcttgttcttcctgctgcgagctttagcctcaaactccaccttgaatgtggagtgaacttggagtgaactttgtctgtggctcagcctgcccgtggcctgtctgtctgccccattctgccctcacgtctctagagaggacagcaatgccttccccatatatgttcatttctctgatgattgtagtgtctaatgggtttcattctgatgaacttgagcccctcacttgggcttgttctttgctctgatggggagtaatttgagggactctcatgacgccatgcctgctccagacaacccctaggagcttgcaaagattgccctgtaggaggaattgctgatgtcctgtgaataattcctgggaaggaaatgccaggctgacccatcacatagactgcatagccatgacttagcagggtggagcacccacactgtcgtgtggacagaaagttcacagcctgagtgagactgggcgctgggctgagattgctggcacgggtctcctggagctgcaggcaggcatgcccgggctggcgggggagctgcatgcactgccacccccagaggagggcagggccgtgtggggatactgcagaggatgaccgaggggcatgattagagagaggctaccctgaaaacactctgctaggcttccagatttttgttttgggctggtcctgctcaggatctgtgagaagtatgtaggaacattgggccaccgtctcctgcccatcaaaaggctacatgccatgtggaaggaaggcagggcttggggtcaaatctgggtatacaactcttcccttctttccattttcttacttggaatatttacttactcacttgagtttcagttttatcatctgtaacatgaggaaaataatacctacctcaattgctttgtagggtttcataaagctaaaataatacccatgatctccttgggggcagaaactgccaggatcatttttagcatttaacacgctgcctgacacaaagtggtcatgtaacatttgttggataaaactccacaaactgtaaggaatgttacacacatggtaattattactaataattcagcaaatggtatttaaccacagacttcctgcctaggcaccagggaaagaggggaaagaacacgacatgtgaatacacagctgtccctagggctcctggagttctcgcggtgccccaggtgccatgcatgactttaaagatgggagtggggatgcaggatgccagacatgtggcccttgggtgggaattgggaccccagatctttaatcacttaagccttgggaggtgtaaaagtgttttcccattccacagagggtacaaaaggatacagggcacattgcacggcccccagggcaaatgcagtgtggtgtgctctttcatttaagccgaggccacaagtaactatcggacaaggttggaagcagaaagcagtgagcacccagagaggaacaggagtaggctgtggagctcaggagctctgaatcagagccagggtggagcggaggtgtctcagcccctgagatgttgcagtcttcctgttaatctgccttgtggaattaagctatacctgcggggtcctagggatgtgattcagcacaggccaccatgggccatctgtgagcaaagtgctgagcccaccatggtggaaatacagaaatagacaagactcggggcttgctcccggggaacttaaaacagtgaactatgaaacgaggcgtggtgaaagtcaatttcttacagagataagatgggaacccggagtgggcaggctcaccaaggaggtggcatttgggtggatcttgaaaggtctgtagagtttgaattggagacagattagaggtgagaaaacacactgaggtgtggaaacccacaggttcttcagggaataagtggacgggagtggagcgtggagggctggtaaacagatcgcgaaggagattttgaaaggaggaacgtggccagagcgttgtcacatcaggagtttagtccgcaagtagaggtgggccctgtggctttccctctagtcacttgtcttacagagaaggggactgaggttgtgagggtggggctggcatttgacttcgtcccactccttcccatcttctgggctccatctgcttggtactcacgtgtaacagccttaggggacctgccctccctgtgggggcccagacctggggaatctggttgagtctggctgctcagtgggtctgggcgcaaagcatgtggagaaattgagaagctcgaagcagaacagctaatccctgatgtccgtcgggtgggttttgtatgcttaataagtaaagataacgtgcattttacactttactaaaacgcattacctcatctgactttccttttccctccatcccagctggtgagttggggactcagtgacccttgggagaaggggaagggagcagctggggggcgcaccttgttgaattcatggggtctttcctggggaccttcggttttgtgatgaggaagtggagtggctggaggacatcagcgtggcaaatggaatgccttcaggaatgacgcaaggggaaggtggctgtggctgagggtgaggaacagctgccaggaaggaagactgaatgtgagttttctggcagtgatggatggagcagagatgggcctgaggccactgacagggagctttaggaatgagaagcctgtgcccacattgcttttttttttctttccttaattttttttttttaattatcatctgtagctcattgaatttagttcatcagttatttgaaataaatcagatgtacttgggaagtactggccagtaggtgttagagtgttagcctgtacaaaaccttccctctgggaaatgctggaaggagagccttcgtgtcacaaaagccgttaacacacactgtgaggtgccttggagagaggtcactcaggccagggagggcaggcgtgcctgacaccagctgctaggactgcattggagtgaggccactcagccttgaaggtcaaagagcagatgacaactgagagtaattgatgaaccagggactgtaggaagagtcattttaaataaggcctttggggctgtgcgcagtggctcttgcctgtaatcccagcactttgagaggtcgagatgggtggatcacttttggccaggagttcaagaccaggctgggcaacatagcaaaaccccatctttactaaaaatacagaaaattagctgggcatggtggcacacgcccagctactcaggaggctacggcaggagaatcgcttaaacccaggaggtggaggttgcagtgtgctgagatcacaccactgcattccagcctgggcgacaaagtgagaccctattcccctaacacccccgccccccaaaaaaagccttcggaagacagttaaagaatttaggaacacggccgggtgcagtggctcacgcctgtaatcccagcacttagggaggttgaggcgggcagatcacgaggtcaggagatcgagaccatcctggctaacacggtgaaaccctgtctctactaaaaatacaaaaaaattagccaggcgtggtggcgggcgcctgtaatcccagctactcgggaggctgaggcaggagaatggcatgaacccaggaggcggagcttgcagtgagccgagatcgcgccactgcactccagcctcgcgacaaagcgagactccgtctcaaaaaaaaaaaaaaaaagaatttaggaacacaagcagatagtgcgtgggcccaatcactggtcctacaccaagcatcttgactatttagttgttcactgcagccctcaaaagctgcccgtgcatccctaagcccaagccaatcccgaggcaacaaagaaacgaaagtcgttttttgttgttttttaaaaagtttttaaagtcagctgaattgaggtctactctgcaaacaataaaattcaccagtttttgtttttgtttctgtttttttaaacagtttcactcttgtcacccaggctggagtgcaatggcgcgatattggctcactgcaacctctgcttcctgggttcaagcgattctcgtgcgtcagcctcctgagtagctgggattacaggtgcccgccaccacacctggctaatttttgtatttttagtagagacagagattcaccatgttggccaggctggtctccaactcctgacctcaggtgatccgcccgcgttggcttcccaaagtgctaggattacaggcatgaaccactgtgcccggccaaaattcacgttttaaatgtgcagtttagtgggttttgtgaaatcgtctaagcaccctacagatgtaacgtagcagagtgccgtcacgcagaactcccctcttcagttggttcccccattcctgcctcctgtcatctctgcgctgctttctgtccttacaattttgcctttcttagaattccgtataaatggaatgatagggtatgtaaccttttgtgtatgattgcttttgcttgacctagtgccctggagattacaatgttacatgtatctttagaccactcctttgcattgctgaataatgttctgttgtatggatacagagtaagttcccccttagctgcattttactctccaaggtttcagttacctgaagtcatcccaggtccgaaaatagtacatacaacgagatattttgagaaagagaccacattcacataacttttattacagtatattgttggccgggcacggtggctcatgtctgtaatcccagcactttgggagggcgaggtgggtggatcacaaggttgggagttcgagaccagcctggccaatatagtgaaaccccgtctctactaaaaatacaaaaattagccgggcgtggtggcacgttcctgtagtcccagttactcaggaggctgaggcaggagaattgcttgaagccaggaggcagaggctgcagtgagcagagattgcaccactgcactgcactccagcctggggaacagagggagactgtctcaaaaaaaaaaaaaaaaaaaaaaaaaaaaatatatatatatatatatacacgtgtgtgtgtatgcatatatatagtatattgttataattattctattagtcattgttgttaatcctaattaatgtgcctaatttataaactaaacttttttttttttttttggaggcagagtcttactctgttgcctaggctggagtgcagtggcatcatcccagctcattgcaacctctgtctcccgggttcaagcaattctcctgcctcagcctcccaagtagctgggattacaggcatgcaccactacccccagctaatttttggattttttttttttttttttttttttttagtagagacggggttttaccatgttggtcaggctggtctcgaactcctgaccccaagtgatctacccacctcagcctcccaaagtgctgggattacaggtttgagccaccgtccccggcctataaactaaactttatcagaggtatgtgtgtatagaaaaaaaaaacccagtatatacaggatttggtactgtctggtttcaggcatccactgggagtcttggaatgtattccctgaagataagcggtactacttgttatcagttcaccaagtgatgggcatttgggttctttccagtttttggctattatggataaagcttctatgaacatttgactacaagtctttgtgtaggtagacacgttttatattttgacttcgggaaatacctgagagtgcaattgccgtgttgtgtgctaagtgtgtgtttaactttatcaaatgctgccatcccattttccaaagtggctgcatcatttttcatttccactaaccacgtatgagagttccagttccttcacttcctcatcggtgcttggcattatcagccattttactgggtgtgtaatggaatcttattgtggtttaatttatatttccctggtaactaatgaaaccagaatcttggccattgtgtatcttctttgatgttatgtgtctatacttgtaccatgtaagttggttctcagatcatacaatgcatcatgagagtagagattctaatgagtattgaatgtctcttacctgaagggctgttcaggagaaatggactatttaagtaacaataatctgaaacaagattctgaaagatgtgctctgtggaataatattgcacatattcctagaagctgggataaatcattcacacagaaaaaactggaaggatctagcaatttacttaaattctcctatggaattttaaaaagatggcctcatattgccttgttactatggaatggttgatttgatgtaaatgcacactgcagcttaatgaagtagcctctctggttctgtgtgtccttgccgtggattcggcagatggtgtcgtcagagattatggagttcaagccacctagctttacagaggtgaagggaggtgcctgagttgatgaagggagtcgggggcagagctggtgccagcaccatgtggtgctccagaggttcttcaggggtctgcttgacctgtattgcttttatctttaaaatttccaacagttgttaaaaagttttctgaaaagatttatactctgatgtttgcatcacatagcagggaggtgatctcaccagaacattttgaagtcttggtaaacattgggctggggggcacaagatcgtctgatttatttgtatgcgtattggtaggtagcatgctaggcattgagggacttaagaactggggtttataagcaggttataaactacagtacctccagtgatctggctctatagcttagttgtttttaatgccctgttttgatgaaggaacctgtgtagacttaaagttgtagaatgaccagtgcgtcactatattttccctagtcattgacatatttgcacgttcagacattcatagaaatggcaggagaaaaactattctagggtcccctgcaaaaaaaaaaaaaaaaaaagaaagcaagtaattctggcagcccaattaattcatttaatgaatatttattgagtgccaaccatgtgccagcttggggtgatgaagataaaaaattagcatgtcagtgggcgccaggatgttaaaagttggagtttagcacgagggtgtatatgcatgtgctgccttcacttaaatgtcaggcaaagcggcagtgtcaactgtacataaagaaattagcgtttaacatgctgtgccaatgatgatgctgtccatgggctgagcagtcaatatatgtttcagatgcttcttgtctaacatatctgagataaggactgcaaggagatattagatgttgttagtggtagagagttgaaacaaatttcttactattccaaagcttttggattttgtttttaaaaaagaatgtggccatctgtttctatttacatgtgcaaatcagaattgtctctgtcttgtgtaactggaagagtattgaaatgaaagtgcaggccactggcatccaactgccaatttcaaatgaatgaaaacagcctcagtgttctcattgattccattttggggatgtgatggtatgcatttgagcaatttgtattccagcaagagacctttttaatccatttcctctgtgtgacagaggagttgggttttaaaaaagcactgaccgagagtcagtatgactgtctcttagccgcttgtcctgtccaccctcagtccttgttcctctccttcctgatcctcctgctgcagccaagggctgggagggggcagcacagctgatggactcattccaagtccttggctggagtgcctcctgcctgctaacagcctgtcactttcttcaggatgtgcctgtgttacctgctccagggtgtctttccctaacagcctgtcacagggcgtttggtagaaactaaagagcagcagaggatggtttcattcattccatgttcgtggagtgtttacacgtgtcgggcattccactggtgctggagattcaaaaatcagaaggtgcgggcccccatcctgaaggagtgacagtttgtccttgttccttagggttcagctaatgaaaagtctcaattgccttgggaaatttgaagtctgaaagcagggactgttttatagtagtctcaaacagtggtaggaaggatatacctacttagtaagcattatggaatgaccataggtgcctaaaacttttccctgcaaaattaaaatagctttattttcttggtttattgtttcttaactttttaacaggagattaccttgaacaaactaatgaaccagtacatgatgtcggaaagaacaggctaggagaatgtgaaagtgtggttgttttgttttgtttttgagacaaggtttctctctgtcactcaggctggagtgcagtggcacgatctccattcacgtcaaccttcgtttcccaggttcaagctattctcctgcctcagcctcccgagtagctgggagtacaaactcacgccaccatgcccggctaatttttttgtatttttggtagagatggggtttcaccacgttggctaggctggtcttgatctccttgtgacctcaagtgatccgcccgcctcggcctcccaaagtgctgggattacagatgtgagccacggtgcctggcctgaaagtggtttttaagcaaaaaaagagaatacaaaggtggcattttggtttatccttacctatgtggccttggaaaaatacctttgtgagtgttactttctatgttgttgcaataatattgcctgtgttaccaactgcccaggttggagagtcatgtgccataatctgtgtgaaagcacttttagaagtgctgtgcagttggaagcctgttattactgctacccccacaaccagtgctggtatcatcacatttgtaccctgactttggggtaggatatacggacatacacatttcatttctttccatctattttgagaaatctaagccagggaaatgcagtggaattcttcattaaaaattacctttggccaggtgtgggggctcacgcctggctgggtgacagagcgatacttcatctcaaaaaaaaaaaaaaatttctatgattaccagctatttatttgtaaagttgaaataaatgctattcacagtattgatagtaatcagtagttgttttttttttttttttttgagacttttggtcaggagtcttactttcctttaaaaaatacctcacatatgtttgaatgtaattgtaagatttccttcttggaaagataactaaaatgcaagctgttttaaaggtggtactttcatagaattttgtatctagaagctcagaggagaagtggctcacctaaggccccaatccgagtaggtgacagtctccatggtgcccccgccgccacactcatcttctcattttgcacaatgcatgattttcagtccccacaacaaatgcaaaccttcccgggtcctggggcagtgtggcttgagcaggcgaaacccccggaagctgctgactctcttgtggctgttgcaacttctttagatctcttgaggaacagtaaatattccacagatcagcttcagagcagacagcattctggctgagaaacagatgatcttcacttttacttatttatttctctcgctctctctcctcttcacttctcaaactaaacatagcagcattacatgtagtctttgcttttaggactcagcattttagagtctgtaggtccatgctcctgattacagactggggtctgcagccctccagtgatattcctcggattgcagccagtttcgcggggccagaccaggaccctgggcctgctcttcggcctttctctgtggtgtctgcaggcctgactgtccccttagcagggaagggaattgctctgggccgtggtccagcccgtgggacggaggttcagcctcttccccttacttgctgctgcccagggagcccttcccctcgcttcctctcttgttctgttagctggggtttcaaattttcttttctttggatggaaaacaaacaaagaaagtaaaactaatgggctgaagcccttccttggggagaaacattcatccctcaacgctgagaataaatggcctttgctgaccctagcagcacagccaagggccgccatccctgcctgttgctgcacttcccctcccttctgcgccatcctgcagtggcagggaccctgcccttccttgcgtctgcccccgcttcctgcgccctgctctcctgccaggctgcccaggctggggtgcccctctctgcaggctcccacccctcagcctggcttgtacctctcaagtcctcctcttgtactcctgctccctggtaggtggatgctatcagagggcacagttttcagcccaaaaccttaaggaacaaaaatgaacagcaccatctgcatctctttggccctcgcctctgtctccaccttgctccttggcgctctcaggccccctgccccgaggctggaccgctgttgggagtgtggcaccagtgggtggactgctttccattgagggcagcagaacccagccttgtgtgtgtgttttagcgcagagatcttcagatgaactcatctgaggccgacaggcaaagtagccctgcacatctggggccagggatggaggccgatgctaaatgccccccatgtctcctcagctcccttgcaccctgatgagcccctgcagtgtcctgcatagtccttgggctaagtggagccgagtatggaacccaggtctaaaattgggaatggctgtccagtgtctgcgcatcgccccctcccctatctgggaaactctgtggttgaggaaccccacttacaaggccccaggcaggctggcctctccccgagtcaggcaccagtctgatggcctgatggctctgctatggaggtgggaggggaaaggtcctccaccaacctggggactctccaactgtcaaggcaacaatcactgtattgagtagctattactgcccgcattttaaggataggaacactgaggcccaggtgatcaagtaatttgtgtgtggagatgtgggaatgaaagctcatggtcttcatctgtagcagtgactcccgcagtaagcctgggtcatgaggatgaggtgggatccagaatctgctgctgggggcgggaaggatgcctggctgatccctgtgcaccttcgggccctccctcagctcattccccctctcccatcacctcactgcttggattgtagaaaaatgaaaggttcatgcctagagatgaccaattttggggtaggagctgcgggtggagcggggcccatgacctctgtgtgggagaagctggagaggggcacggggctggccaggctctaaaaggcacatgaccttgtttgcatcgtcacactccttttttagaaaacaatctctgctgcatacagaggttggctttgtgcagggccccagcaatcctggtggttccttcctgcctttcttctcccttccctattctgggtttttctcctccctgcttcccattctaccataggggaatggggtcaagtcttttggatgggaaacaggaactgagaagttgaagatggagaaatgaaagactaaagatagcagggttttaattttccctctgaaaagcccaggaagagccccggattgtgtaacctggacacatgcaaatgatgaccctgcccctactctatctgcttctccgccaccctggcccttcagaagattctgaaacaaggaattggttacccagggtggttaggggggttgtgcctgtgtccctggtgaactttagattcttgtgcccctggtgaacttcaaatgctagtgtgctgggagccgtatgacagccccttggggtggcaggagctggcttgtgtggaggagagccactggcagctttcttggtgaaggggtggacagcactcttggtgtggaagtagcagcccccttgcctgtagctgggctggggttagtggaacagggtttagagaaagcaggggtaatgccgggtggttattttccccaaatgttagagaaagccagcgcttctggctctggaagtgaggctgttgggaagtgggagggggagcacagctctggaagctgccttccgtcctccctccattggctggagctctcccagcatttcatcggttcaaagccaaacacatgattttggacaagtcacttaaactctttgagtcagtttcttctcctttaagctggggaaagaggtggtgatttcacaagtggttgtaaatattgcagtaaagataatggaagtaaaagtgctctgtggagtgtaaattgctgtatggtagttggagttgggccctaggtgtgattttagagtacacacctactgctgccttggtaacttaaaagtatttatctcaaatgctagtgagctgagctgagtggcacagtaggcctttctttccctgggagcactttgggagctttggaggttgcccagtgctgcccccaacctttaacagtgtggccgagtgtaggagggagggggcagagttccttctggctggactgccacatgcaggggagaggccccgctggtggtgtcccaggtgggagaggggcagacctggggttacctcagtcagggtaggtgaggaggggatgggtggacaccccggtggccactcctactcacccctgcacttaagacctggggtttcatgccctgctcctttaaccctcagtgttcaagagagaggccagttggaccagagcgcctcaccccaccatttgccatgtgcccctccccgtggggagtcagaaacacctgagcacaccaggaaaagttttgaaaaacaatgtttttagagacagggtgttgctacgttgcccaggctggactcaaactcctgggctcaagcgatcctcctgcctcagcctcctcagtagctgggaatgataggcgcgtgccatcatgcctgtatgaagttttgaaaaatttaaatgttgatggaaaaaaaaatgtattagtggaaatgaaaggctggtataagctgtaaagtctttttgttcttagagatttttttctcattctaaacattatcagacctgaaaagtatttgtcgtaatgactgagacggtcctggggtaacagcgtcttcttaacggccactttaattggcgtagtttacacctagcctctccgagaactggaggacactggtaatcactattagatattgagtgctgactgtatggcagacacataagcattggtgatctcctgtgaggcaggtattgttattcccaatttatagatgaagaaacagaagtcagtgaggtggagtccgtttttgaggtcacgcggctagtaattggagcctggtttagaaccaagtcagtctcattccagaatccagaaccagtgatttgtaactgatgcacttgtctccaaagggatccagcactgggttttctcatttttaatgcatccattccttaaagcctctgttcacagtcacaaggtgtactttttaaaggaacacagcacacaaatgtgaccgctagtggacagcagtggcagcccagttggatggcagagcctggcatgccgactgggacagaagccccagcacacggtgtgatgatggcgtctccaggctgacctccatggcctcaggaatcaaagtcctcagtctctttcacgcggggttcagaaagaaaactcggctatcttacatctcctctcccctgtttatttgactaaagtgaagttcatgtggcttgagcctcgtttcctggggaaatcagcctggcttaggattccattgtcttctgggactgggaagatgtggaaggctgacctcacgcccagctgaaggtcaccttcccagactctgagctcggctgccttctgcatcgccacggctggagggcctggcccaggccgtggctgcatgctggctttccactgtctcggtgtccctgctgcctgtcagtaatgtgcccagcaccttctggtgtcatgtcccctcttgtttgtgattcttttcctgagctagtccattttctacctcgagtctgctctcctgccattcccaggggccacagctcagtaatgtgggtgtcagggaaccccaggccaggcccccttgtgccactgtggctctccccaaagcagggcaccaggctggctgggggggtcctgcccagagctgccccacgctgccgtgtttgtgctgctgctgtgcagtggtgatcttgccaaaatgtggcttttcctttctcactcccccagagctcccagaaaagtctctaggacttttcttccccctaaataaaagtcaggatgtgaagccttttgacagaattggagtttactgtcatctgtttccgtttctctaagatagggatcctggcgaagcccatgaaagccatggggcgctcccaccgaagcctccgaggcacagacctcccgggagtgcctgtgggcgctgcttccttaaactgcaggaggctgcagcctctcgttgttcatgcgtcgttttttcatagtgtgtgtgggtttagagctacatgggttcttttctcacttatctgttcataccgcatgacaccgtccacttcaggcacagttgacggccgtctggaggtcatcagctgagggcacagtttgcctggttcttctataataggttaagtatttttttctccatttttttcccttttaaaagtactgctagaaggccaggtgccgtgtctcacacctgtaatcccagcactttaggaggccaaggcgggcggatcagttgaggtcaggagttcaataccagcctggccaacctaaggaaacctcatctttactaaaaatacaaaaattaaccaggtatggtggtatgcacctgtagtcccagctactcagaaggctgaggtgggaggatcacttgagccttggaaagagaggttgcagtgagccaagatcacaccactgcactccaccctgggcagtgagtgagaccctgtctcaaaaaaataataataataataataataataataaacacaagtactgctggaacttctttgcagaaacaacttgtggggaaggagggaggtatattttagtatttggccttgggaaaaggttttgcttctgcaggcatgtcttccagagactgggggggcccgtgctggcgtcaccactgtccccttccccatcaggaaccttccttccttggatggcatttccagtgtgtccgggcctctgctgttctcattatgagtccccagctctgacggccactgtggctgatgcacagggtgttggagacagtgattcagcccagcaggctgtattcatgtgctgttcctctgtacacccagagctgtcttctcgctcatcatttattaatctttcccatgcaagtcatacgtgaatatatccttgtggtaaagttttcaggtgatagcgaaaactcagtctcctgtcaccgtcttctctcctcatctaggtgcgcgctataactaagtcctttgcctcttccagagtttttttctccctgtgtaccattggccctctgcacttgtgggttttgcatcctcgtgttcagtcacatagggtctcaaggggaaaatattcaagaaaaaatatccaataaaaactaatacagcaatttaaaaaatacaaattttggccagacacaatgccttatgcctctaatcctagcactttgggaggctgagacaggggaatcacttgagcccaggagtttgagaccagcctgggcaacatagggagacgtctctgcaaaaaatttgaaaattagccgggtgtggtggcatgtgcctgtgctcccagctactcaggacgctgaggcaagaggatcacttgagcccgggaggtggaggctgcagtgagccgtgatcacaccactgcacttcagcctgggggacaaagtgagatcctatctcaaaaaaataaataaataatgaaaaatacaaatttttaaaaatacagtgtaacaactgtttacatagcatttacattgcattagatataagtaatctagagatgatttaaagcatgtgggaggatgtgtgtaggttacatgcaaatatgacaacattctacattacgaattgagcatccttggattttggaattcaacggaatcccggaattaatcccccatggagaccgagggactacagttttgagtatttttgttttattgtttaatctgtccctttgacacatttttgtgctcagagttaaagacctcaataccctgcttgatgggaggagaagagaaaagggtaacaaagtataggatagtacttttcattttctttaattcgaaaaaattatcaaataatgtattcatgttaatgatagtttaaaagtgggaaaacaaaaaattcctccaacttttcctaagacaacaatgattattttctttctgtatctttatatacagagttttaagtgtttgatatatcacttgtctatcctcttttataagtatttttttctttgcttttacaatttgtgtgtgtgtgtgtgtctgtgcgtgtaatggatttaataaacaagcttgtgattttcatttatgtatttatttttttgagacggagtttcactcttgttgccaaagctggagtgcaatggcacgatcttgactcactgcaacctccacctccccggttcaagtgattctcctgcctcagcctcccgagtagctgggattacaggcgcgtgccaccatgcccagctaattttttgtatttttagtagaagcggggtttcaccatgttagccaggctggtcttgaactcctgacctcaagtgatccacccccccaccccctgccttggcctcccaaagtgttgggattacaggtgtgagccaccacacccagcccataagcttgtaattttctatttctgaaattggaatttttataaaaacgattgcctttttatcttttttttttttttttggacacaggatctcactctgttgcccaggctagagttcagtggcacagtcatagcccactgcagcctcgacttcccagactcaagtgatcctcctgcttcagcctcaccagtaactgggaccacaggcacctaccaccacacccggctaatttttttactttttgtagagatggggtctcactgtgttgcctaggcctgtctgaaatgcttaggctcaagtggtctgcccacctcagccttccaaagtgttggggttacaagcatgagccactgtgccagttgccttttcatcttctgcagagctgccttacttgtgttttgtcctcagtgctgttcctgtgcgggtggtgggcgtctgcatgtacacaggccagcttccctcactgctggggggcctgcaggtctgggtgcaccttgttacccaggctagccttcctctgcagaggtgtgaactctgccaccaccccgttctagtcaagatgggaatggaatctcagaaaggaagccatctaggagaaaaatgaaagaagtgtttctcttatgtttgctgccgtcaaagttgctactttaggagctcagaaaaacagttatttgtaagatggattaagtaagtagtttagtaagattgcccaaaaccacctcccagagttagtgggaagcgcctgatgctggggagaaaagcccgaggcctgagctggccgacctgcattcagtttcctctgtctctagcttctctctgatggtttagaaatggtactaagggattcctaagtcccttttgcttcctgtggtcaaccaacatgctaggctaataaattactcctgaagttcactttcattttggcaacattttctggttctttcgccaactctaatttcttttctttaaaagatgctttaattttacttgtattcttaataatatatcttatatatacacacacatagcattaaaaattttttcaatgagatttttttaaaaaattcaacttttattttagatcggggggtacatgtgtaggtttgctacgtgggatatattgcatgatgctgagttttggggcatgattgatcccatcacccaggtactgagcatagtacccaacagttagtttttcagcctctctccacatctctccgctctctagtagtccccagtttctattgtttgtttctttatgtcatgagtactcaacatttagctcccacttataagtgagaacatgcagtgtttgtttttttgttcctgtgttgatttgcttaggattagggcctgcagctgcatccatgttgctgcagaggacatgatttagttcttttttatggctgcgtcatattccatggtgtatatgtaccacattttctttatccaatccactgttgatgggtacctgggttgattccatgtctttgctattgatacaaatgacatttaaagaatgattatgaaggccacgtgcagtttctcatgcctgtaatcccagcactttgggaggtcaaggtgggtggatcacttgaggccgggagttcgagaccaacctgcctaacatggtgaaacccccgtctctactaaaaatacagaaattagctgggcgtagtagtgcacacctgtagttccagctactcagaaggctgaggcctgagaatcgcttgaacccaggaggcagaggttgtagtgagtcgagaatgcaccactgtactccagcctgagcaacagagcaagactctatctcaaaaaaaaaaaaaaaaaaaaaaaaagaatgattataaagcctggttttggccagcactccaagcgcgccccgcaggcctgtcccatcgtaacgccctcagaagcttcccctgccctgactgcagccctcagcttgcctcagtttgtagtttgccaacaaggtgtatatccctaaacataaacaatttagtttggcctgtttttgaactttttatactgcatgtattcttttgctcaacatttttgtcaagttcacttgtgttgtggggtaagtttgttctcttccgttgctgtgtagcattctgttgtacgaatgtccatcatcagtttattcattttaccatcgacatttcggtttatccagttgggggctgttttgaggagtgttaggacagcctgtccatgtcttctgttgtggatgtatatttactctgagtaattttaattttttaagataataccaaaacacgcccttctcatctgtccttaggcacacactttcctcagctgtgacttagctcagacgtctatttgatcttaattcttagcgacacctgctattcttcaggcctggctttattcccacaaggggggaggttcgttattgctctggctttaaacggagcccacaggtcacagtgcaagtctacgcttcccaaaaggcttctggaaatatttgacactgtcattaatgctctctgttactttctgaagagtcgaatgcgtggtgagacaaagctgccatctgaatgtctgtctgactcttcttggcaaagccaccctgggggcacggacctgggtgtgttttgttttttgttttgtctactgtctttcagaaatgtcccttcttctcaggctggcctttcgtccgtggaacgaggggagaggagataggacgggagagcggagcatgctagggctgcctgagtgctgcaggcctctgctctccccagggcagcatcttcgggttctaagaaggaagccagcctcttcccacccctgctggttcgcattgagaactcagggtgctggggacaaaccggtgctgtgctgcctgcagtgtgggctccctgtcagggctgggaggagtggggtgcaggggccgctggtgctgtgggaggggcattttgcatggatccttgaggccagggctcagcaaaccttttctgtgaggggccagagatagtaaatattttaggtttggcgggcctcaaggcggtatgtaggtacttacataagagaggtgataaatatctacaaattttttattaatgaaattcaaaatataaaaataataatggagtacaattttttggtaatgcaggtctcctaaggggaagagaggaattattttgcgggggggagggggcgcgcataacatttatcttaattaatttgggttcagttggtctttcctgtgaccctgtccttgcattcattggaaatgttcgtctggaaacacccttagctcacggttggataaaagctgtcccgcaggccgtgtgtgcccaccctgagccaggtcatctcctcagatagtgggcttggcccgcaccattcagcctgtggtgacacaggatggaggccctgtagggttctgtgggggaccaagaagaggtagaggagcccccacatggaggagggtggccatggggtgatgttgatgctgagcccacgggggaaccatggccagggcctccgggtgaccccagaggtggtggcaccgccctcaggcggtacagtggggcccatgaacggaggaagagaagcatggggttggggacattcagaggccactgtgctgcctgggtggctgtagctcttgcagaaggtggcaaggcctgaggaactgaatttgaaatttgaatgaatctttatagaaacattcctctgtggctaccctgttggacagcacaggtgtggaaaatgagtgaacagctttgtggtggtctctcctgtggtggacttcccttacccacagtgtgcaccgtccccactgtccccacacactgtccccgtcccctgtcctggctccagctcagctgagcagcagagattggaagaggcccctcggtaacttgagaggaacctatagaagagtttgggaactccaaacagatgcttttaaagtggtttgaaacagtagttttcctcagaaatatttgggacacatccccctctctggtttttgtgataagttcactctgtaaaacttgtttgacaaactgaaggtcagcttccacctggcccctgagaattaatgaggtctggccaggcggcagctgcagtgcaggccctgctcctgtcttggggtctcttcggttcttgcctttgtttgtgttttttacacataagttcccgtgaaagttgcttttcccccgctctgagctggagtggagttttcgtttggggagcatggtagttgagagcctgggtctggttagaattctcagcctgatgggtagacatctttgcttcctcgagactcaagctttgttattttttgttgctctaagatttcagtatttttttttaaatttttgattattgtgggtacgtggtatatatttttatggggtacatgggatattttgatacaggcatgcagtgcataataatcacattagggtaaatggggcttccatcacctcaaagcatttagccttcttttgtgttacatctcaattatactctcttagttatttttaaatgtacaataaattattgttgacctttgtcaccctgtttctatcaaatactagatcttattcattctgtccacctatatttttgtacccatttaccatccccacttccaccccacctacccttcccagcctctggtaaccatccttctactgtcagtctccatgagttcaattgttttcatttttttttttttttttttttttttgagacggagtctcgctccgtcgcccaggctggagtgcagtggcgcgatctcggctcactgcaagccccgcctcccgggttcacgccattctcctgcctcagcctcccgagtagctgggactacaggtgcccgccactacgcccggctaatttttttgtatttttagtagagacggggtttcaccgtgttagccaggatagtctcgatctcgtgacctcgtgatccacctgcctcggcctcccaaagtgctgggattacaggcgtgagccaccgcgcccggccctgttttcatttttttttatggctcttttcagtttatttcatgaaggagttacactagtccaagttaaaagcggaccccaaatggttacattatacaagctgtgaggtttttaaacttgtgacaagggacagaagggaaattctactcattgcaaggaaatcctcacttaaactacagtgagccacaagcatttaaaccccatgaatcttcagctgatcgtccttagccagtccaagctctacgaggaactggcataatatatgttcttgcacctgtcaccctgtagctgaattacttctccatattctggatgctcaattacagtaccattgcaggcaaacttcttaaacgccttcactggtttctttttggtgtaatcatcagcgatcccttggacagtagtaagggccttcctgccgtttctctgttgaattcttatatggatataatcctcagtgccagcaggaagcaggtcatcacccttacttgcatcagcaaaggagtttaaatagtggaggttctggatagtggacatacgatccaatttctttttctcggtggaaatggtctgcggaagacggcgggcagagggtacggaaagtagggaagcgacggggcccaagggggaggctgctgagtcctcggcagtggctcagtgactggggtggttttaatttttttttttagctcccacaaataattgaaaacatggagtgtttgtctttctgtacgtggcttatttcccttaacataataacctctatttccatccacatcattgcagctgacaggatctcattcttttttatggctgaatagtactccattgtgtataggtaccacattttctttattcattcttctgttagtggacacttagattgtttccaaatcttggccattgtgaacagtgctgcagtaaacacgggagagcaggtacctctttagtatactgatttcctttcttttgggtatgtacacagcagtggaattgctggatcatatcatagctctatttttagttttttgaggaacctccatactgttctccatagtggttgtactaatttacattcccaccaatagtgtacaggggttcccttttctccacatccccacaagcatttgttattgcctgccttttgcctataaaccattttaactggggtgagattatatcattgtagttttgatttgcattgctcggatgatcaatgatgttgaacacctttttgtatgcctgtttgccatttgtatgtcttctttggagatatgtctatttatatcttttgccctttttaaaattggatcattagattttttcctatagagttgtttgagcttcttacatattttggttattaattccttgtcagatggatagtttgcaaatattttctcccattttgtgggttgtctcttcactttgttgattgtttcctttgctgtgcagaagctttttaacttgatatgatcccatttatctgtttttgctttggttgcctgtgcttgtggggcattactcaagaattctttgcccagaccagtgtcctgcagtttctccatttcttataggagtttcatagtttgaggtcatagatttaagtctttaatccattttggtttgatttttgtgtatggtgaaagatagaggtctagttttattcttctgagcatggatatttagtcttcccagcacaatttattgaaaaaattgtcctttccccagtgtatgttcttggcacatttgtaaaaaatgagttcactgtaaatgtatggatttatttctgggttctctattccattagtctatgtgtctgtttttatgccagtaccatactgttttggctactatagctctatagtataatttaagtaaggtaatgtggttcctccagttttgttctttttgcttagaatagctttggctattctgggtcttttgtggttctatataaatcttagggttattttttctatttctgtgaagaaaagcattggtattttgatagagattgcattgaatctgtaaatcgttctgggtagtatggacattttaacaatattgattcttccagtccacaaatatggaatatcttcattttttttggtgtcctcttcaatttcttacatcatcgttttatagttttcgctgtagagatcctgtacttctttggttaattcctaggtatttaattttatttgtagctattgtaaatgggattattttcttgattgctttttcagattgttcactgttggcatatagaaatgctactaatttttgtatgttgattttgtatcctgcaactttactgaatttatctatcagtgtaaccacccaatgggttcaccttgcccgctgctgcctagaccaagctgatttatcaagacaggggaactgcagtagaggaagagtaattcacgcagagccagctgtgcaggaaactggaattttattattattcgaatcagtctcctggagcattcggggatcagagtttttaaggataatttggtgggtcagggccagtgagttgggagtgctgattggttgggtcggagatgaactcataggcagtcaaaactgtcgttttgtgttgagtcagttcctgggtgggggccacaggaccagatgagccagtttattgatctgggtggtgtcagctgatccagtgaatacagggtctgcaaaatatctcaagtgctgatattatgttttacaatagtgatgttatgcagcctccagctgcatgactcctaaaccataatttctaaacttgtggctaatttattagtcctgcaaaggctgtctagtccccaggcaggaagaggggtttattttgggaaagggccattgtcatctttgtttcaaagctaaactgtaagttcctcccaaagttagttcagcctaggcccaggaatgaacaaggacagcttggaggttagaaacaggatggagtcagttatgtcagatctctttcactgtaataattatctcagttataatttttgcaaaggtagttttttcagttctgatagtttttatgatggcatctttaggtttttccaaatataagatcacatcatctgcaaacaaggctaattcaacttcatccttccaatttggaggccctttatttctttctcttgtctaatctctagctaggacttccagtgctgtttttatatatagttggcataagactgtttctagcattcaatctttttttttttttttttttttgagacagagtctcattttgtcacccaagctggagtacagtggtgtgatctccgctcactgcaacctttgtcccccaggttcaagcgattctcctgcctcagcctcctgagtagctgggattatgggcatgcaccaccatgcccagctaatttttgtatttttagtagaatcggagttttaccatgttgtgcaggctggtctggaacttctgacttcaagtaatccggccatctcggcctcccaaagtgctgggattacaggcatgagccaccgcgtccagcctaacactcaatcttaaacaatcattctagcttctcgtcctgaccaagtttaattttaattgtctataaatatgcaccataatgaagggtgtgtttctgaatagggaggtaattgcttttcccacttgcaattttaattaaaaattacctcttccacctacctcacctttatttctaatctgtttaacagattgtagaaaagcaagtttatgcactcatccctgagttcaggaagcactacttcctctttggtaacaaaggtagaagattccatatggtgacctattttttcaagagttttatgcagtaaatgatcagggacgggtgtgtcccatgacataatatgggaggaaatttgtcagagttcaattgtgttattaaggtatgttgtctgtgagcagccttttacattgaagtttaccaccgcttccagtcccatgttttgttttttcatttgtctgttttttttttttttttaagagacagggtctgtctgtcacccaggctatagggcagtggcgcaatcatggttcgctgcagcctccaacttctggatttaagtgatcctccctcctcagcctgggattacaggtgcatgttcccatgcccggctaacttatttttattttttgtagagacagggtgtcactgttggccaggctggtctcaagctcctggtctcaaacattcttcccaccttggcctcccaaagcactggtattatagtaggtgtgagctaccgcatccagcctagtccttgtgttcttagcacggttgacccaaactcctgtagacacaagatcactctgtcatctgtgggagtatcagaggcaggagggctgaaatctggttgagagagacagcacagatctccctggctggcttttccagaacggctactgcccagctttagccctgaatggcttttgaaccatgggttccagccagttccctcttctttgcgtagcctctccctgaatgcacttcctgcctgccctgatccattaccctccctgtggcctgagtaaccttcaagcacagctcccgtttcccctctgggaagcactgttgcctggcacttgagcccctgcattttgggctcatcatcctttcctgagctgcttcttgagtcctgttctgtggcaagctctctggtaggcactggggatacaatgaacaaatatcagtgactgaccttagaggaaagcattaaaaaaactaaaaagaggcggtacgattaattttgttgatattttctataacctaagatgtccacaatattgttttaacgtggcacttagccacatttcaggtgctccgtagacacgtgctggtagctgctgtagtggatggctgtggcctagaggcagagctggacaagttaaaaaagcagttctgtgcacgtagtaagtcctgggctcctgttttcatcgttaatttgtgtttctctaggtgattatcttttgtgagttgtgaattccaagaaggcacaggcattgccttgtcctgttttcctcaccattgtgtcagtaataccttgcaggtagaaggtgctcacaccattttatccaatgaaatgctaagcacagggcattatgggaaaagctgagatgagtacctgccaccctatcgtggaggtggcaaggcatcagaggccttctcaggagagaggagtgtgtgcacgggctgggaagacagcagggggagggggagccacaggtagctcattatgatggaagcttggggtacatgtgaaagtgatggagaatatgaggagctgatgccagagaagcaggcagagctcagatgatcagatttttaaagcttgctaaagatgttattctgagaacaccaggaagccttatagtgcctgggctgggacctgcccctcaagccttcctgtgtcatcttttttttctcttttttttctttttgagacagagtctcaccctgttgcccaggctggagtgtagcggcacaatcttggctcactgcaacctccacctcccaggttcaagcgattcttttgcctcagcctcctgagtagctgggattacaggcacacccaccaacacgcccggctaatttttgtatttttagtagagacagggtttcaccatgttggctaggctggcctcgaactcctgacctcaagtgatcctcccacctcgacctctcaaagtgttgggattacaggcatgagccactgcgcatggtctctttcttctttattcgtgaggtgttttctccctttacacttgctggcccatggaaggtgcttagtaagaatggtggctgacttctaatgcttccagagagcctgacaggctgacatgggtgtcttccactgtctgtggggaggcttagaaagaggagtggcttttattaatattatgagtgtggatcagatcctgctggagccaatggcaaagcctggagccggcccagattctgcgagagtgctaggctgcacggtcacagatcaaatgtgcttttcaagaatggcccctctcctgggatggggaacttagagctctgaggagcaccgtgaactggcacctctatgtgtgagagctgtgctgtctgacatgtggtctaagcttcgcgaactggtgtttctggcacagccctgagcacaacctcagtctgcccactggtgctggctgagcctggcctaggtcccgcgagtctgcggctggaagactggggaggaaaagtgatgagactgcaagagaaagataatttaattatgattgtcctgagttatttactgtttccaagtccccttttgtatcttgaaggaaggtaggaatggatcagagataaccacttgggaaaatacgagttaactccatataagaaatcttgattatcttgtatcggtaactctctactctttagtatggcaggaaagaatgccttttttatttaaataaacatttttagttttaggttcacaacaaaattgaatggaaaatacagaaactttccaaatacccgttccccttgacatgcatagcctcctcctttgttaacatcccgcactacaagtggtatgctggtgaccctcagtgaaccgacagggacacatcactctcacctatatctttacttcaccttagggctcactcttgtacattccatgggcttggacaaatgtataatgacatgattataacttctctttgtattgcagccactctgtcaaatgtctggtgccttgtgatcatttttccatttaaaattgccagcactaatcatgtctgtttttagcatccaataaaattatcattgtggcattagaaccagggcttacgattctgctattgaaaactggttcaaaaggtgatttcaggaaggctggaagtccagaatccattgctctgaggagctgtgctgtgtttctgatgataggttgttgcaggtttttatgatctaaactcacatggggtaataatggacactcaatagcagtagttattatgtgccagtagctgtagggcagggtgcttcatttagttttcataggatagcctgtgattggcatcgctatcccagttcacaaatgttgtctccctccagtcacaagtcaccctttgcttttctatgttgtttaagtgggttaaaaggactttttacccagcatgttgggaggttgaggcaggtggatcccctgaggtcaggagtttgagaccatcctgtctaacatggtgaaaccccgtctctactaaaaatgcaaaaattagctgggcatggtggcatacccctgtaatcccagctacttgggaggctgaggcaggagaattgcttgaacccaggaggcagaggctgcagtgagccaagatcgtgccactgcactctagcctgggtgacagagcgagaccccttctcaaaaaaaaaaaaaaaagaaaaagaacaaaggactttttacctttgtatctgttgtgaaagtcaaggtgtaattaaatttccaggtgtgattagtcgttgaacagataactgtttgagcgcctcctatgtgctggacattgtgagtgccatagacaactgccgtgtagtagctggtctataaacatttgctgaatattatatatgagagtacctctatctaattattcaaccctgcaaagtgggtattgttcctgctggtttctggagaagaaatctgaggctcgggaagcaataggacccgtcttctaacacagcttacaagctaatgatatttgggtttttccaaatccagagtggggttgcctccaccttgttagggctctatagggggaaggggtgcaggcacgataggagtccctggcaggcaggggcatcctggagccttgctggtaaccaaggagaacggagggttcggctggagtaattcacttcgctgcagagggctcacgtccagcaggtgctgtgggcaggagacagcttgcatgctgcaggaggaggagttggttttcagtaattgccaacaaacttctgcttagtgccatttggaaaccagtcttccacaccacactgagggcttgtctcccagaaacaggtgccgagggacctggcagaggaggcttgtctcccagaaacaggtgcctagggacctggcagaggcaatcagagtggcactcaacgtggtgctcgctgctagcgtggtctcagcacagacacggtttaatgactgtattctctacattttaggctttggacgtggaccggatggttctttacaaaatgaagaaatccgtgaaagcaatcaacagctctgggctgggtgagtatacatccttccctagaggtttctgtgtggaaaatgtcgcatttgaagtcctggtaccgtaatattgatgaccattaacaaatgagccagctagactcctttatcggggcatgcagatcacagaggtgagctgggatgtttctttttcagaagtatgttttgttttgccagtcgtctgattcaggtgtgggatttcgtcccctgtcatcccctgtcatcctccgtgctgtctgtcccacgttgcacttcctgttttctggagcatcgtcctgcacgtacccactttgtcagcctggctgatgggggcctggattcattcctgcctctgtcatttggtttttgctgttaattgtgtcacagtgccctttccgtttctcttttacccagtcttgccttttctagtataggaagaaaatgaataaatagacaaacataaagtaatatttgatctagatttacacatacatattttttacacatatatatttacacatatatattttttaaacccatgcaacttttggcttaaagatgacaagtaggtcacctgtagcataccttcccttgtacaaatcctacgagtgatacaaaatattttttaaaagtcgttaagtgactatatagtttcattcagcaacaaaaaggtggcatccttgcagggctaggaactgtgaggagtccctgagagactgaaacagggctgatgggttgctcaggggagcttgcccgtgctcaggtgcagatagagtttgggtgacagggtgggaggaggaggggcctggggtctgctcccactgaagtagtcaggtcccttcatctatactgtgtcccctcaccctcgtggtgtctttctttagtgaaaggggtgattggaacaggaggacagggagtgccttagatggtcgtggtgtcaggagggaaggggaagagcctggaagtacacattccacctgctcccccccaccgcccccaccagttacaatagggcgggcacaagctccagttgccgctcttgattctccccccatgagagctgtgcaagccacaatcgggaagaatctagcaggaaatcccaggtgcaggataatgttacagttgagcattgccaagtgtatttaggaacaaatttaacagaagacgcacaggaatcctacatcaacaagtacaaaacgctgctgaccaaaatgaaagaagacctaaatgagaaatatgtgatgcacaggggttagaagagtcaccactgttagtgtcaggcctccccaaactgatctgaagattcaccccaaccccagtcagaattacagcagcggaaattgacaggccttttctaaaactgatacagaaggtggccatccgtctctagcttttttacctggattaagtgtggggcagggagcaataatgatagttttgatttttttgaacacttactgtgtatcttgtgctttctgtacattgtgctaatcttgtcaacaactgattctccttatacaaatgagtaacctgcaaatcagagagttctgggtgttcccaagatgtctgtgcagctggagctcagaccctgatggtcttactgctgtgtcagggttgtgtgcagtgagtggcccactctgtttcaaagccaccatgccttcagtgtgtctgtcacacgggtgacatcttgaagacttcagtgagtcactaagaaatggtacgcccagtttcattgacaagcaccagatttcaaaaagtatcttggaagattttttttttttttactgcgttcacttggactttttgagtttataacttgagggatatttgatattctggtcagactcaaaaatgattttatagtcatatgttgaaaaggttgctcttatcagaaataaaaatgaaataatctgtgtcttatgcaaacactggctgtgtagctgctgctcgtctggaggagagacttgtgtgactcccaaggctggcccagtggctggcagtacagcttataaacagccctgcatttgaagggagaaggcgctagtgcttcggtgtcaggaagctggcctgcaggaatttaacagcacctctgtctaatttgccatgctgacctatattgctgagcgtgtaccacaaacctcattcctatttctaaccacccccaagcgtcgtttgctaaaatgcaaccccactggtgttacttctctgcctaaaactctatagcattttttcatcaccctctttgaagttcgtggaagtcagttccagagcatgggagagagaaggaaggcctctgtgggcttcagaattttagggcaattgggataaagatggttctcttaccacagatccatccaaagattttaatgtgctagtaatgtggattgtgagtggttatcgttcttaaccctttcccaattcatctgtcgatgaaactgtcactgcctcccctgatcaccccactgtgagcctcaggtgagtaaatactgcagagcaccagatgagttccgagctcttgtgcattgcctggactcaggccacctgtcccgaccctccccacctggactcctctgtgcccttctttgaaataacttgcagttttccccagagagccacgttttatgccttcttccctctgctcatgctctgctgtttgcttaaaatagcatttgccactttatgaaagaaaactgaggtccaaggaagttgagaagtttgttcaaagtcacaaagctctacagtgacagggctgggattttaacgtagctccttgggctcatgtcctttttgaggccccgcacataacagcctggcatgtgaccttggagggggtctcctatttttgtcatcctttagccatctattatgtcatgccaagtttgagttattctaaggtcatgagtctgagtcctgaaaagtcctaagtcctaaaaccagagcctgatcctgaaatctttatttcggaacaagcgttgtctactgcaaagaagtcacctgaggaaacgtgatactttctcctgtcatgttgatgacatcattcacagtgtctttagaactctttagaactgcttttagtagcacgttcttttgcatatatttagtagagaagtctaaggatagattaaatttttttagaactagatgtcagaaataagtcaggcatattcaagaagggactgagtgccagcgaccacagttggcttcggtgcactgtaactacagtcatgggctctgaaggcagctggttccaaaggagaagtccccatagtgttttgatcacgagaataaagaccaaaggcaattcctgtataggaagagcgctcattttatgtacgattgaaagaacagtgagaataaattagcatttatgcttcatactgccatattccttgtcttgtctcatgtttcttaatttctttgggaccaagatttcctgcctgctttcctgatttgtcacagattggccccatttgacccatctctgtaccagtgtccctcactgcaggctgctggcctgtcactgcttcctgagtgtgtgccagctgtacttctgtgtctttgcacagccccacccagtctgtaaacggactcccccatcccagtcacctgcaggggacctgcccttgcttccccacccattttcatcaagccttagctctctttgacttcagcgtagccctctttgactctcttgtaatagattcttttttttttcctctctttttttgagatggtgcttcactctgttgcccaggctggagtgcagtggcatgatctcggctcactgcagcctccgcctcctgggttcaagtgattttcctgcctcagcctcccaagtagctgggattacaggtgtctaccaccacacccaactaatttttgtaattttagtggagatgggttttcatcatgctggctaggctgatctcgagcttctgacctcaagtgatccaccagcctcggcctccctgtaatagtttcttattgctgttgtaacaaattaccataaaatgagttggcttaaaatggcacaaagttatctttcagttcggccatgggaaacccgacatgggtctcactgggctaaaatgaagatgttaacagggctccttccctgaggcttcaggggaaatcggtgtccttttcctgctcctagaggccacctgcattccttagctcacggctcccttccatcttcaaagctggtcatggccggtggtgtctttctcacactgcattgctctgacacttagatggctcgggctgctataacaaaataccatagattggtgggttaaacaacagaaatttattttctcacaggcctgggggctgggaagtccaagatcagggtgtcagtgtggatgggttctggtgagggctctcctctccttcctggcttgcagacagctgccttctccctgtaccctcacatggcagcgagagaaagcaagatgtccactttctcctcttataaggaccctaatgccatcaggagggcctcacccacttgacctcatctaaacctaattattatgcttcccgatggccccatctccagacaccattgccttggggattagggctttaatatatgaatctgggggaagggacgcaattcagtcccatagcaaacactgactcttctgcctccctcttctacatataaggacccttgtgatgacattggcctcatccagataatccagataatctccccatctcaagttcagctgattagcaactgtatttcatccacaatttcaattcctctttgccaagtagcataacgtactcacaagttccagggattaggaggtgggcatctggtggtggaggagacgttattctgtctaccacacctctcctgaattcttaggatttggaggttgaatcagtttccactgttttgttcagctacaaattaaagggtacctaacatgcaggcactgttaacactttaaatattgctcctgattgttctctagtagttttgtatctgttgatcttttctcagttaattagaagcccttgaggtgaaagaccaattctgggagatggtgtcatttaggataaagaagacgtaggtattagaatccaagaacccttgattaaaagctagcaatgccactcaaaaagcctgtgacattaggacgattattttacctttctgagcctcaatttcctcatgtgtaaaatgggaatttaataggtcataggattgctagtgaagattaagtgagataacatgaaaaagtgccatgcatggttctggacatacacgtggtaagtgtgacagctgtgacatacctcctgtgtgttccttgcagtggctgccatgggtgtgggcgggtaataggtgcccagtaaatactgagtgtttatacattatcaggttcctgctgtatgtacttacactgctttcttagtgtaggaggggtgaacttacaattttagatgtaagtggtgtgtgttacgacaggccctgtattctattctttgaggatttatatggatttatgtagaaggaagatttaagatgccttacaatggaggctggaaaactgtggccagacacctgtgttttcacagcctgaaagctaagaatggtttcttaccatcgttacctgcacaataacctcagtattgcctcagcaacccacagtgtgatggtctctggagatggggcctttgggaagtaattagctttagatgagggcatgagagtggggccctcatgatggggttagtgccctgcttaaatatttactctctgactttctaggaaaaagtttttgaatccctgcattagagcagtggttataaactggagagagtatcagaataccccggggtcttgttaaaatagggattgagtttctggttcagcaggtcagggttggagcctgagtattttatttgctaattgaaaaagctcccaggtgacggcactggactttgagaatcctacctcagaaccccccatccccacttcaaacactgaactgggacaaaagggtatctgcatgtcccacgtgtatacaaaacagtagtcttcttccacaatagtcagtgcattatgtttgctcccagtcttcaaaatgatggcaacccagccagctgtattttctggagagtcttagcttgggtttccaaaagcagttgtcataatgatttatgagaaactgtttgccactcagtgatggattgcttatttattttaaactcttacttgtctaaaatttcccaagctctggctcagcccaaaggtgttccttccacaccccaggaagttgaagctaacatttttagctgtttgacatatcagtgggtggaaaaattcatctctatcaagaaggaagcaacagaagattttcattttcacttctctagaattattctgtcataaggacttgttagaacattcttatcgagagtgatattcctaccctcaatcagaatatcctagaaaattatcacattcttgaaagtacaaagaaatgctgattttccctcaaatccttaccatctcccacatacaaaagaaaatgagaatacaacaactttgtgtgtgtgttcctgcctgttgtttgcagtgttaattggaatatgatattaaaatacacttcaaattcatacagaaaactatttctattgtagatattatcaattagaacagggcagttcagaacaaatatatataatagttgaggaaatgaagtttcactgtgcattaagaagatactggctgggcacggtgactcacgcctgtaatcctagcactttgggaggctgaggcagatggatcgcttgagctcaggagttgaagaccagcctaggcaacatggcgaaaccctgcctctacaaaaaaatacaaaaattagctgggcatgatggtgtatgcctgtagtcccagctgtttgggagggtgaggcaggaagattacatgaacctgggaggttgaggctgcagtgagctgaaactgcaccactgcacttcatcctgggtgacagagtgagaccctgtctccaaaacagaaaaaaaggaaaaggattttttttaaaaaaggaaaaaaaaaaatatatatatatatactgtatctgatttctacctgttacatgagaaaataacaaaatcagaataatctttactgtttggcaagcttacagtaactagtactctgctccattgttgtggcactgaaaacatgcacgcagagtttctggaaagcagtttggtggtacacatcaagaaaaataacaatctttttgtggaaggagatccatgcacaaagatgttcactttgttgttgcactgcttatcaaagtgagaaattggatgcctcctatatatagctgaattaggatttagctgcttgctggaattatgtttatacagcaacaggaagagaaatgcttgtgatgaaatcttcagcaataaaattcaggatgcaaaatttatgtacaccgtgtgtgattaaaaaggaatagatgataaatgatgataaagaatatttttattgatattcacaaacgagggtagaagcatagtggtaataaatactcatgaggtatttgttagaatatttgtattataaagctaaataaaaactttatgtgaattccatccttacagccttgtgagttgggtcctgtccattgacagatgagctcacagaggcactgagtagtgatctgccagtgtcatctagccaacagttggaggagctgagattcaaaaccaggtgagcgtcccgtctctgcttctgactgctgcggcatgctgcctggtgctgaggcgggaagttgctgggggcacacggtggagaaaacaagcagcaacgtggggaacaccctacgtgccacctggctgagccatcgtagtccttctgaaaaattccaggtggttttggttgattacagggtcagtgtgagccagtacgtggcacatgccccaaaggtgagccacacatgacctcagtgaagtctttggtgcttataaataaggttgttgtttcattatttagttgtaagagcagcatttaaagaagaacctgaaaaccttagggatggagaaacctccttgtaggacggatatctgaaggacgcggggctcctggtttcggaaggggcaggagagggcgtacatgaagggctttctctggctgaggaaggtagacatagtatttgttcctctctagaggaggctttcacaagagcaagccttgactcagatatgagggagaggataactgggtgagcagactgagcggcgagctggtggttggaaggttcctgcagcgggtggacggcctctgtctctgaggaagttatagagggaggtgaggacgtgggctcgaaggccctggagatgtcttccagttgtgagactctggagtccagccttctccccgctgctggctaacaacaatgattggaatttagatggtgacttgtggaatcctgtccgcagtgaccactgcattagtcatggaaggagggtacctctgaaggaacacagaggtctgtgacttaactaacgtccaagtgttggcatgaatcatactttggttcagaggtatctgctatttaatttggctggcttttatagtcagccagtctgtgggccaacctgctggccgcatgcatctgtaagacatggggctgcagtttcatcagtggttctttaatcttttggttatcatagacatcagtaaaaataagaaggctgttttggatgatccctccaggaaaaggtacctttacataattttgcatacactgtttgggatgcccatacccccataaacctgtccgcaaacccaacctaccaagcaaaaaagctcagaccttgagcttaaatcttctaccaaatcaacacgatgacttcatctgtttcctcatctgtaaaatcctgcagagttgtaaggatgaaagatatttctacacgtatgtcatctccacagtgttcatggtagctactatctgaggctttagagaccatgtactttccaagggctgcttgtccctgagggtgaggctccaggatctcgtgaaaccacaggagtcagcttgcttcccaggggctgtgccctccatggagttgggtgggggcagcgtgtgtttttaagtcatcactgtggtgagcgtggggtcatggggtatgacgtggcaaaaatgaagggctgaaagctgcttaccctggcaaaatgcacattctgtaatgtagcgagtcagattgctttgccaacatgaactcttcctccattaaaggatgtgaatataattgggagtaaaatttctaatagcttgtactccccatacaacaaatgttgaattcacctcttggctttgaaccccagacaccttggggtagcctgtctccaggctaaaggagagccctgcaagttttttagtgaaacccccttcccaccacctccaacccccttctccttccctgatttggtctcagagcacccctaggagggaagcagctctctggttaaggagagtctagggtgagtcaagcagctggtagctcagttttaatctcatgccatactacattttcaatgaggaaattcctctaaatgtcatctgctccaagaagccttttctgttaccagcccccagaaaatgtactcctttccccatagagtgctgtgtttccacctcgtgtaatttacatcacagtggattgttttcgcatgtttatctttgtcttgctaagttgtgtgttggcaggtaccaaggtttattatctttcttgaatgcagatctcttagaagccttttggctgctctccgttacctgggatgaagttcctcatctctggctcctgcctgactctccagcccttccccatgctctggacacaccaagcgccttgaattccccagagctcattttgtttcttgcctttgtgtcgctgcactgaactgatgggctgagtctttctcacttattggatgcttgcttcttgagggtaggggctctgtttgatgaatctttgtgttcattagtgcttgctggagaatagactttcagtgtgattggattttattctttagtaaccagaaatattcttgacccgtaatggaagcacacaatgaatgaataaaagtaaatgcggatacattctgtactctaaagcctaaagggacagaaaccatcaacataaaaaaaaatatgcagtagcccagtctccactcttcaccctctcacctgccttccaagtgtactcctacaagcagtaggagcttcacagggaggtcattggggtgacgtttagttattcacacagactttgaactcatttgaacatcactggaaggatgggatcattaatataaggcaggatcaaagaggatgggatgatcatagacaacaggttttgtattttaatagcgcacaccttggcctgattagtgaactccattgctagctgcctgtgctgaacacaaccagactagatacatcctggggtaccatccacaaagactggctgtttcttgaggaatcacattccaagggacttcctaggaaagatgatggaaatgggtattgaaagtggaacaagcccggggtgttggagaaggcggaggaagtggcaggaagaagccggtgagaggcatccttccagttgctcatcctgcacgggagctctcaggggttatgaatagggaggacattcttgttcaaccccttctggttgtggctacttctgtcttgtcaaagatgatacaggtatactcagttccgaaggctgtgtccctcccgtcaccttgtccagggaaagctttgggagagaaagacatattctaatgttatttatttatttatttatttattttcttttgagatggagtctcgctgtgtcacccaggctggagtgcacagtggcacgatctcggctcactgcaacctctgcctcctgggttgaagtgattctcatgcctcagcctcctgaggagctgggattacagacacctgccaccactcctggctaatttttgtatttttattaaagattgggtttcgccctgttggccaggctggtcttgaactcctgacctcaagagatctgcccatctcggcctcccaaagtgctgggattacaggcgtgagccactgcacctggcctaatgttcttaataggcacaggcacagagcactgtaacaatctagccattagagctggtgcttcagatttctttttaaagttttatttattccttacgttgttattataaagctaagataagcttagtttagaaaatttggaaagttcagaaaagcactaaagcaagcaagtcttgagcctggcaggatctcagtatctttataaccagcagaggctcaggtgagcgctgggtctgaggcccactgcgacttggaacacagctctgcctcttagaagttgcaggatcctgggcttgttcacactctgacagtctgtttccttgtccactcagaggagaataaaataacatctagaaagcacttggcctgggacctagtatataacagccttgcatatgacagtttattgactgctagcaagtgctcagttttccccaccactgttagcattttgatgtattatcttttcaacctcctctctacatttcactttttgcaaaattgagactaaatatctaattttatgtcctcccttttttaaacttggctttctgctcctaccatattcctatatcatgattttaaaagccaacataatattccattttgtagaaatactgttaatttaaccattttcatattgttggaacttaacacattttaaattttcactctttataaatgttctgtacacacatctctgatcaccttgattatttccttaggatagatttctggaagtgggattatccagaagaatgatacacattagtaaattggaaatgaaaatatgttttcagccgtttagttgggatgattctagaaataaagttctgaaaatggttctctctcacgagatgtccactaagtagagaccctgttaagaaacagggatgatgtttgatttgaagaaattgcattcccatgagatcatgcgccacaagtgaggtcggaaacaggtggcatgtacagccgacagccggaggaaatggtctccactgtgcagagttgtgcacaacatcacaacattcgtgtcgtgacacacatttgagtagtaatcgtcatgtcatccgtctagggagagtctccaccaggctgctgccatagagaacatatgtctctccttaaacgctcccttcgccgagctgtctgcatggaaggttggaatgtggggtgtcagcaagtgcttttccctctgcctgattcccaagtggcctgtggtctggcctggagcaggggtttggagggtctttgttgggtcagcaaggaggctggggctgggtagccataaggctggtgcaccctgccttcgttctgttatgctggtgacagcacttggtgttcaggttaatggtacatgcacttgactggaaggttgtacattgtcgctgtcttcagctcttagctcttatctaggctaagagctgaagatagcgacaatgtcattagcaaatgaagaaacggtttttgctgtgggaggaagagcactggactcagagtcaggaaacccgagttcttgttccagctctgctgcaaactcactgtgtgaccttgagcaagtcatcaccctctctgagctttggtttccatgtttagactaggtcatctttcaggatccatggaatgaaaggactcagcagtgagtatagcagccctgaggaggtggggacaatgagacctgtgctgccctgtggcgattttgagagttgagagctggatgcagacaggggctttaaaacagagaaagtaggctgggcgtggtggctttgggaggctgaggagggtggatcatgagatcaggagttcaagaccagcctggccaatatggtgaaaccccatctctactaaaaatacaaaaattagccagaagtggtggtgtgcgcctgtagtctcagctactcgggaggctgaggcaggagaatcacttgaacccaggagttggaggttgcagtgagccgagattgcaccactgcactctagtctgggtgacagagtgagattctatctcaaaacaaaaacaaaaacaaaagaaaaacagagaaagtattaacagtgggaacacataggactccctggtattcccctggggctaatgcctgtctgtttctgtgatctgctccttctctactcgacaagtcttacctgtccttggagccccagttcaatgtctccttgccatctgagtcctcagcgcctagcacattgcctgatgcattgtaagtgatcagtgcatagactgacatatctttccccaggcattcatcccagccatgagcatatgtgtccttgtatctcaccccagcataccgtcacatccctgttgccgggctggaaatagtaagttttatgtttgagatgaaaaaggaggtgattgaaggtgagttggctgggggacgcccatcctctggcagtgctgtgttggtggcttgcttcctcactgtgctgtgggccacactgacctgtcaagagccgtatctacatgtgtggcccgtagagggggcgcaaaggagccattcttgtcctttttgtatccagcaatttttgctgaaacaatttgcactgggccttctccttgataccagtttttttaaataacagaatccagtaaactaaaaagcacacaacaaaacctagtcattgcctctaaactctgtatgtacacatgcatgctggcttcatgatcgatttctctgccagagtctctcagttcatccttttgcagggattgatgggtttcgtgcagtgaggtgggggagataaaggggtgatggcttagaattgagaagaaacgaagtcttgtcctagcatggtctctgtgactcagattcttattttccaaagtccctcccaggtcagtgattattggatctggatcattaatgagaattagagtttaagatacatttgaacaagggggaggtgagagtgtgagctctttttagaagaacagctttcacaattctgtaaataaaagctgatagacccagtttgagatctttccagaaactttattcccaagctatttattttaggttcctgttttaaggttgtttttggcaaaagaaaaacaaaggcactgaatgattttctgttctctagtaggaaaatcttcaccttggggtgatctgcagcagtgggtcagtcagtgccatgttaatcatggagggatggctgttgtcgtggtgggcaccgtgctaggtgttagaggaagacacggggcttatgggcttcagcaggaagcttcaagttcatttgcaggatgaaaaatacatctaaaaatccccaactaggccagtgcacaaagattcccactgacctcaactggtacagtgtgagcatcagaagacagtgctgattgcagtggatgaaagcactgtaaacgtaaatccatgagatgatgatggtgatgatgagccaaagaactaattgatcaccttggggttgctggggatcaatacatcgtttagaagatgtataaggacaagaatttttttttttttttttttgagaatagagtcttgctcttttgcccaggctagagtgcagtggtgcgatctctgcccactgcaacctccgctttctaggttcaagtgattctcctgcctcagcctcccgagtagctggaattacaggcatgtgccaccatgcctggctaatttttgtatttttagtagagacagcgtttcatcatgttggccaggctggtctcaaactccagacctcaggtgatgcacctgtctcggcctcccaaagtgctgggattacaggtgtgagccaccgtgtccggccactaatttttttaaaaagaaaaaaacttaacctacaccaggtagtcagttgaggagcccagaaggagggatgataaggagtgcttttgtatttcttggtgctggaacataaagtctactatcagtgagaaggccggctcctctctcctaccaagggctggaggaccaagggctggaggcagcctgcgtggtccataaagtgcaccgatcctcctaccaactctatggtctggggcaggtgacatgactctctgaactgcacttgattcagaagaaaatagggataataatagccaactcttagtgctcaggttaaactgaacaaaagacttacaagccacctagtaggcgttgacctttatacgaagtcccttccctttgggtgttcacttagagcaacactgaggtccagtcctcctcttggtttgagggacaccacgaggctgcatagagtcttcagcttctctcctgctgggctttgcattcattgcccagcaccgtgaaggaggacaccacggcccagctcccctcctttgtcatctcttgaaagacccatggctcagaaagcagcgagcgagggagtaagcaggaccatggaggttgcgttcctgtttctgtcatgcagtagacagtgtgtagtgacagatgcctgcctgtggccaccagcccccttcctgaacccaatgaaactaaactgcccatgtcttgaccgctaattttgagatagtttaaaaatagtatgtggtttgaaaggacctatccttcactgttaaccacactctagaattataaatagagtaaaacagaaggaattattgatccatctgtgaaactggattttaaaaatctaaaaattagatacttttgtttgacaaggtaaactttttaacgatgaaaacaaacatcgtgtagtagagtaggagagtggactttggaatcagaaaatttgggtttgaatcccagctctgccactttctgtgtttccttggatgaattatttgatctctttgagccctaattgcctaatagtgttatgagaaataatacatgtcttacgaagtttagaaaaaatatatgtgaagtttgtgctttgaataagtgacgcctgttgctgctgttacttttgttagtgttattggttatgcgccaagtgtggtaaactgagtctctttacctgattctttcattcttcctctgaccttgagagcatctcccagcaggtttttatcctttatgtagctgacgccgcaggcccagcgtcactgtgacttaccaaggtcatacagatatttacaggtggacataggactggaacctagatcttctgagggctcctgaggagctgcgtttgcgggtgtgtgtgtgtgcacatgtatgtttctgtcagaatttgtttgctgaatctggtctcagaaattcatttaatttatctagaactctcaggctctttactggaatgttaaaaaagaaaaaggactcaaacagtgaagtgagttttcttttgtgtctgctagatccccattagaaccctctagtcccccaaatgccactggaggtcaaagacatggtgcttcccccataggatgggtgagcagaccattcataggtcatagggattggctcagggtccaggactgccctccaggaacaaatgttccctcgttttcccacattgtcaggcccagcctagccattggcgttagctgacagtggtctcatttccccgagaaggaattcgggagctacagaggggctttcaggatctgtcccttggtggaggagctgcagcactaaggctgtctctggtggagttcacatccaggttcacaccgcaggtctggctgccctgttgtgcctgtaaatagttgtgttatatttccagttgaactgatgaaaacatagaaattaggtagccatgcagatagaagttgttttattatagactggctggtttcctttgaaagtgcctgacctagaagtgagggaattatattcaaccacattaatttaccagaatcacctgtgtcccctcccccattcctacccacggtttaaatcagaggtctgagatgggacggtggtgtctagagtttggtgaaaatccatgcatgcatttggcgtccagcagggattgagaaccactgtgccagagacccagagtccagattttcactctttcaggtgctactttgaggcctaatgatagtaaaatgccatgagatgtaagcacctggtatgttttttctgctcaaacaacatgtgtgttgtctaatatttcaggcacacgacttcgtcgaagatgaatacaacttagtctgtcaactctaagcacatccgatgtatggggaacacatttgccagactatttcaatataacatgctgagtgcaaggataggagaggtgccaatgaaatacccagggtgtagggcagagtcatggaaggcttcctggaggaagcatgagtctgtaggatgcagaggagtttgggagggaagggcccctgggtagaggctgcatcctgagcagaggcactggagctgcaaagaccactgctgttgctgtattaaaaggagaaggagctgctgtgtggggctctgaatcagagtcctgggctgcaggctagagaggaatggggcatctgtggttgagtttctgggagggggctgagtctggtgagttgtgccatcatttggtgaaggaagagtcctcggagaggtggaaatgttgtgtgtccttggccatctcatctgatatgctgaggaccactggacgtgggcaagggcttcccctcttgcataccacacttgttctttgggatctgttgccggcaccacgggttgttgttgggataacgaagctatttctgttcctggtgcagcttgacttttctcagatttttcttctgctgatgtgttcagtgttattcacaaccgagaagaacctggtggggagtgagggtggcatgcctgagactcacagcacctccgtcattctgttgcagctcacgtggaaaatgaagagcagtacacccaggctctggagaagtttggcggcaactgtgtatgcagagatgacccagatttaggaagtgcgttcctgaagttctcagtgtttacaaaggagttgacagcacttttcaaaaacctggtaagcagctctgtgtatgaaatgctgcggttacttcagttgggaaagtggctcagtagaggatagttatggtttgtttgataaactaggaatgcatttcatagttccttgggtacccaaaagaattatgtttttatacacattgggtcagtttggaataaagtttaaaattgtaatttttactttaacaagacttaaaattcagctctgcaatttaaatgtacacagctatgggacaaaatgggtaaatgcattcgtcttcttaagggcctctgacttgaatttttaacagtttctaaactgtgtagactactctccttctggtaattatagtaggcatttaagcttataatatttaataaatatgtttcaggcccatcttacacagcaaggtaacctgtaatcaaagcacagaaattaccatgaatatttaaaggccttttgtgctcccaagtgtagaacctaaaaaaaagcaggactgagagcaatgcctcggttttcagccgtgggaatgcggtgctggtgcctgctgcctgtggctgctgcttggtgctgtgggtgaattgcgcctttcttgtgcctggcagctctgtgctatcctcgtgatggggacaacattttgaagaagtgggcagcccaagagggctgtttgggaccctgcccgggtggaatggaccctgggatcgctccagcttttctttcctgtttttcttctccagtttctcctaaaggtcagggaaggccaggtcaagaactcagtaatgctttctctgtaggccacacacaacagcatctttttcgtgtcctctgttaggaagctcataacaagtgaaaaacatagctcattcctgagatggtgatgacagtggttttgggagaccggccttagaaggggagaaatgagggagcatcacatgtgagttcctaatgggaaggggaagagcaggagcactcgggcccttgctctttctccccgtcttcacttatgaacatttctgtaggaaatggtaaaagtaaaaaactgtttctctgctcgagcttttcacttagaggaatttgaaatcccctggggctttggtcaagctcatcccccttcatccttatcctagagtggcggcccacctgctcagcagtggagccctcgccctgcctcagccccatgccctggacactggcaggcatgcatggtggggtctcatcaccaggtcgggaaagagtggagattttttttaaactggagaaactgcatgggcccagggtaaagatccgtagatgctgccatggagggcgtctcctggtagaaaagtcagttggctgcctgctctccccgcacctgggtggataagccctttccatgcacacagagctgcctgttagcttcctggtgcctcacacttcagtacagatgagcagcctccagcatgagggagaccagaaatagcagaaaaatgaacgtacgggaagactgggatgcagcatgctatgaaagaaggccagggacacaactatggtaagaaaatataacattaaaaatccaacaggaagggctggagtagaggaaatctctcagaaaatagatcaaaaagaccaaaaagtgggaaatagataaaagacgaggattaattctcaaggcccagcatccaactggcaggtgttttagaaagagagaaggttgtcatcaatgcaacaaatctaaaggcaatttctaaaaatggaacggaagagtctccaagttgagaggctcacaagtacccagcgcaataagggaaaagacctaccctgaggcatccctgtgtgaacttgcaaaagatcttaaaagcttccagacagcagccggaggattcagaatcagaatggtggtgaacttctcagcagcagcactggaaacgttatggcatggagcaatgccattaaaatcgtgaggaaactaactcagcctggaatgatgcccagccaatcaaagacgagagtagaattaaagatattttcagacatgcaaggcttaaaaactttggctcccatgtgtcatttctctgaaactcctaaaggatgtgttttagtaaaatgaagggaaaagccaagaaagaagaaattgagagtcaggaaacaggacccaacacaggaaagcaagcagtggaagggaattccaagaggatcatggcgaagggaagtcccagcggggctgccaagcagggggcctagaaagcagccagcccaggacggctgacgacgtaggagacgggtggaggcccgggttctgcttctcactcccagactgcccttttacctttattcagctgatatctagacctggattgtctcagctgtaacatggagataataataccatacctgattgtgtggatagattatagccagccggtgactcttacacaggatagcttacttaattcttatgacaatcccataaggtcagtcaatgtcatccccactttacagattagataactgaggccctgaatggtttgaagagctaatatctggcccggcacagtggctcacatgtgtcatcccagcactttgggaggccaaggtgggcgggttgctttgaacccaggagttcaagaccagcctgggcaacatggggaacccctgtttctacaaaaaaatacaaaacttagccaggcgtggtggctcacggctgtagtccctgctactcgggaggctgaggctgaagaattgcttaagcccaggaagcggagattgcagtgagctgacatcacgcccctgtactccacctgggcgacagagagtgagaccctgtctcaaaaacaaaagaagcagcagctaatatctctcttgggaggctcagagtccttgcctaggcaggcccacttggagcactccacaccatggaatccggacgaaactaacttgtctcagttaacaaaagggcagctgcatagttaaataaaaggaatccctccttctcctttataaaatttcctgcaaaagcagaaagcagagcagggcctgcatgttacagctggtacattgctcaccaccctgtggctttgccagtttttaatacttcacatatcactgcaggtcctagttgctgtccagctttctacagagagtaaaggtatcaataaaggtatctgtggcagtgatttgatgagcacccaccggtgtagcaatcactgggctatgcatgaaggatactctgtttcatttattcctcttggcagctgtgcaggatagtttgtatcaccatcctcttaaggcacacagtcacttacagggcccttagctagtgagggacagagttgggattcaaacccaggtattaacactccaaacccaagttgttgtcattgtgacatttaaaggaaccatggcctcttgtcaccttcttgactgatcataagggttcaagtttcaacttgcactttatggaagtcggattgttgatcctatttcctggcaaagatcaaagagagagaaaatttcttacatgagccaaaattagcactcaccatgcctggttttccaggccagcgccggtgtggaagctgcacagccagaggaaggcccagtggcggctcctgcaaagctgggcaaatggggagcggattatggcggaagtctccttttttggaattttgtgcaccattcttcttcctgtttttggtcacatctggcttatctcatatcttccaagccttgcttttgctttccctcgggcatttaaaacatttcagttctgtctggctaagactcacagtgctacctcttgtccagaaagaataacaattaccacctacctgcttggaggcgtgaaagaatgtttataaagcagttggaagatctccagagaaatgccagcttaatataaagcaagattttcttactaatgggtgagattctcacctgcagaagtctgtgaattttctctgcggtgatgcaggatgaaagggaaaaccagacggctccagaaatgtgacatgtgtgaaattaaagtgcttatgaagtcagcctagtttcaggggttcttttcctcttccccaatggatgtgagaatcctggaaagactccaagggccacctctgtgctgagaagtggctttctaatgaaaggctgcatttcagggcaggtttctgaaaggtttgttacagatatgtagtctctgtctccagtgttagaggattgttagtgaaagatgtcctcacggtctgcagaacccgctccacatgaagatcagcatccattgaaagcaggagccaatgggtgctgaggagaggacagagttgcagcatgagatctgaggtgaccctgggctaaggagttttccctcacccatgttgatagaggaaatggaaagctctaccaagcaacgtgtgtatccatcatctttttttttttttttttttttgagacggagtctcgttctgttgtccaggctggagtgcagtggcacaatctcagctctctgcaagctctgcctcccaggttcatgccattctcctgcctcagcctcacatgtagctgggactacaggtgcccaccgccatgcccggctagtttttggtatttttagtagagatggggtttcaccacgttagccaggatggtctcgatctcctgacctcgtgatccacccgccttggcctcccaaagtgcagggattacaggcgtgagccaccgcgcccggcctttttttttttttttttcccaaacacagatgatgtgagttagaagcctttttttttttttttttttttgagacggagtctcgctctgtcgcccaggctggagcgcagtggtgcagtcttggctcactgcagcctctgcctctcgcgttcaagcgatccttctgcctcagcctcccgagtagctgggactacaggcacgtgccaccatgcccagctaatttttatatttttagcagagacggagtttgactgtattggccaggctggtcttgaattcctgacctcgtgatctgcccacctcggcctcccaaagtgctaggattgcaggcatgagccaccatgcctggccaactttttttgtttgtttgtttgaaacagagtctcactgtgtcgcccaagctagagtgcagtggcacgatcttggctcactgcagcctccgcctcccgggttccagctattcttgtgcctcagcctcccaagtagctgggattataggcgcgagccaccacacccagctaagttttgtatttttagtacagacggggtttctccatgttggccaggctggtctcgaactcctgacctcaagtgatccacccgcctgggtctcccaaagtactgggattacaggtgtgagccaccacctgtaataccaaagtactgggattacaggtgtgagccaccacgcctggtcagaagacattatagctaaccttactagggaggtagtaaggttctgttgggacaagcagtagtttgtggctttctcatatgtgctgcacctggcagaggggcatcctggcttggctgcattggtactagtacagcaggactctgcccagtgctgtcaggcttaggttaagtgtgagctgattgtccatattagtaaggcttgtctcgtcactcaatatagacatcttgctaccagaggtcctcaccctcagtacttccatagactttctcctaacttcttgtattgcaaatgtcttagattcttaaatgtcttactttgttttttaattaaacaagagcaatgatcatagtatcatctttttgggaggaagatttaagtcactgttttagacataaactaatgaactatgctgaaatctagagacatccccagtggcttggggtacgtgggaatatccgcccttggattagtcctggactattattaggtgtccgtttctgacatttgctttttaatattctgacactttttctattggttgccctttttcctgctgtcagtgcttgggtgcctctaaggtctctgtttcacgatgctgcgagctgaagagcaaggtgacttggcttgttagacttgggtgcaaattaggagtccataggcttcgcttgaggagggcttgagggctagggctttgagtgaggaggggagagagagtaccttgatggacttgctgacagtcgctttgggcccctagaaacctctgccatttagattttggcatggcctcatttatagttggaaattccttatctaagacccaaaagacttcaacgctaagctatgttctatactcacaaatctctaaccaaaaacaaaagcacattgtttgatcgagacaatgaacaaataaggctggtgtcagatatctacattttggttgtggcatagccacataatagatttccattggacttggatactgtttctttttggggttgggagggaatgctgtgatacggtaacccccatacagagaaagtgggagaagccatattgggcaaagatagcatggtgaggccttgggcgtgggagggagaactcacagagacgaggactgggcacctgctgggtgctatccatgcgctggtgctgtatggggcggtgacctctggcaactcctgcctgggcaggggacacagatgcttttattagaagacatgtgccgggacagccactggcagcctgcggagccctgagggtacagcattggaagcagggagcagtgactccccgccctgagccctgggtccctgcttccctggatccctgagggtggaggggcactgcagtatggcacttgtccatctgcacacaagcctgcttgcaaggtttagaaatcagtttcttcacaattgtcaaatgtgtgtaggacatgctgtttctgtttgaaagtattaatgaacctaaaacagggtttgtttttgtttttgtcattgtgtgttttcttaattgctggctattaaagggacaactgccacgatgtaggtgacctcaaacttagaaaaaaattgtttgccaaatctacaaggtactgtgtggaatggctctagtggggatgtagatagggggtggaagggctgtagggggtgtagatatgcggtggaggggctgtagggggggtgtagatacaggtgggagggctgtagggggatgtacataggtgggagggctgcagttgtgggggtgtagatacagggtggagaggctgtagtcttgggagtatagatattggtggagaggctggagtagtggagtatagatattggtggaggggttgtagtattgaggtatagatattggtggagggggtgtaatagtggggtatagatattggtggaggggctggactagtggggtataggtattggtggagggggttgtaatagtggggtatagatattggtggaggggctggagtagtgaggtatagatattggtggaggggctggacgagtggggtgtagatattggtggaggaggttgtaatagtggggtatagatattggtggacaggctggagtagtggggtgtagatgttagtggagaggctggagtagtgaggtatagatattggcggagggggttgtaatagtggggtatagatattggtggacaagctggagtagtggggtaaagatattggtggaggggctagtgtagtgaggtatagatattggtggaggggccgtaatagtggggtatagatactggtgaggggctgtaatagtggggtacagatattggtggagggggttgtaatagtggggtatagatattggtggaggggctggagtagtgaggtatagatattggagggtctggagtagtgaggtatagatattggttgacaggctgcagtagtggggtatacatattggtggaggggctgtaatagtggggtatagatgttggtgtagaggctgtagtagtggggtatagatgttggtggaggggctgtagtagtggggtatagatattggaggggctggagcagtgaggtatagatattggtggaggggctgtaatagtggggtatagatattggtggagaggctgtagtagtggggtatagatattggtgtagaggctgtagtagtggggtatagatattggtggagaggctgtagtagtggggtatagatattggtggaggggctgtaatagtggggtacagatattggtggaggggctgtagtagtgaggtatagatattggagggtctggagtagtgaggtatagatattggtggacaggctggagtagtggggtatacatattggtggaggggctgtaatagtggggtatagatattggtggagaggctgtagtagtggggtatagatattggtggagaggctgtagtagtggggtatagatattggtggaggggctgtagtagtgaggtatagatattggaggggctggagtagtgacgtatagatattggtggaggggctgtaatagtggggtatagatattggtgtagaggctgtagtagtggggtatagatattggttgacaggctggagtagtggggtatagatattggtggaggggctgtaatagtggggtacagatattggtggaggggctgtagtagtggggtatagatattggtgtagaggctgtagtagtggggtggtagatatgggatggaggggctgtgggagagtatcgatatgaggtagagaggctgtagggggtggggttatgggggtaggggctgtgaggggtgtatatattggtggaggggctggcgtagtgggggtgtagacatggggtggaggggctctaggggtgtagagagggagtggaagcgctgcaggagggtgtatataccacgtggagagttgtagtactgggggtggagatatggcctggtggggctgtaggggatagagataccgggtgggagggctgtagtagtgggggttgtgagtgaaggaggtcggggagccacatccgcagcagggatgcagaagagcagccgtgtcggcttgggtgcctgcgaggggcctcagggacgtttcccagactttcttaaaggcagaagagcggctgctgcaggtggaggcatagggaccacaggtgttcactgttctaagaagggttgataacggaagaggaaagcaggtgggaagggttcctagggtgagaggggcttgagcctgtttctgggccccagggaaggagctggaagctcaaggttgatgagaaggaaaatggggggctgtgagctgtggagatcctgtgcccctttgtcctcgggttgatgagcccagccaggagtcaagcctctgctcctggctcgctgagggaattgtcagcgaattgatagaaattcagcatgtgcttgtttgcattcctccttctttgggaactttcagccgtttggtaatcattgcttaaaatctgaagcctggcaccccatatcagtgcccatatactccaggttccagcttagaaggcatgtgggcagggtttgtaccattggtgccccaggggccctggccggacatccacagagcatcactggaatcgcctggggcttcttagaattccagcctctcggaggcctgcaaagccagaatcttagtgtgtaggagccccaggcaatagcaggcagtcaagcttgagcagcactgccctggagcagaggtcctccaagtgcagcccctgggccagctgcaccagcagcaccggaattgttagaaatgcgcagccccagcctccacacctcacctgcagggttgtggctctccagctggagtgcatcagcatcgcctgcgtggcttgttagaccacacctgttggacttcccctagagtttctgattccgcaggtctgggatagggcccagggttttgcatttcctgttcctagtcacgctggccttgctggtcaggagccacactgagaaccactgccccaaggacagcctgggtccagtgcttccgactctcacccttggcgagatggagacttcaggtgccccaggtcctgtggaggtcagagctacttcctaaacctggattcttggaggtaatacatttgaaaaagtactttcatttctggttgatggcttcagcaaatgttttaccatcacccggttttagaagtagttttgggtgcctgagtcctgggttctccagtgctgccctccggctcccagaaccggccttcagctggtgtcagtgtggttgttggtggctgactgacatgtccaagcttatcctttattctagtggagaagggggcagagggcccagttttctctccacttagagcctgaaagatcagagctgttgactgccagagaagcagcattaagagcagaaaccaggtcagcgattttcctccttgttctggtgtgaaagttgccaatgtgtttttggcagctggctggttttgatctttcagtttgtgttaaacacttaggatcagcatgggctcccccttctcctttttaattaaacagcgactgtgctgccagggacgggctgggcgcatctgttcaggagggccctgtgtgagagtgcatagacgggagtgtgtgcatacgtgtgcttgtctgtgtgcatgcatatgtgtacgtgtgcatgcatgtgtgtatgatagacctcaaggcaattctgtggcccaggggatctgttcactgacaccaaaaacaaaagtggcctagatgattgtattagtctgttcttgcactgctataaagacatatctgagactgggtaacatatatataacacatatataacacacacatatataacatatgtttaattggcttacggttccacaggctgtagaggaagcatggcagcatctgctctgctcggcttctggggaggcctcaggaaacttacaatcatggcagaaggtgaagggggagccagcacttcgcatggccgtgggcaggggcaagaatgaggcgggaggtgccacacacttttaaactcacttgctacacagtaccaaggggcatgatgccaaaccagtcgtgagaacttcacccccgtgattgagtcatctcccaccaggccccagctccaacactggggactgcaattggacatgaggtttgagcggggacacagacccaaaccacatcagtgattttcctgtttagagtttccttgtatgtacctgacgggctgctctgtgtaaaagggaacaggagggcttttcgatggagacagcatctaggatggcagcatgtgcccagcctcagcttagcttagcctggcctggcaggtgtaaaccatcttgccctgtgccagcaggagtttcagtccagccgtctttaatagtgagctgagaggaagagctctggcttcactgttctagccaactccgctgctaatagttgtgtgatttggaggcaacgtggatgactcaagcctctgttgccatacctgcaaaatgggggtcacggcacatacttctcagagtaattgcaagggttgaatgggattaaagggccctgtgtcatctggtggtttattcaggccattttagtcagtaccttgtgcttctcaaaaatactttctgcctggatacccgttctttcagataagcggcctttagaaagaacagagagctgtcctttgaacctgccagtcatactcctgccccaggacctttgtgttagagtcccgttggcccagagcgcacttcccccaggtcctcatgtggctctctgccccgcctcctttgcgctctgctccaagaccaccttataaaaaggcctttctgacactatttgaaagagtctccatcccacaaatgatcatggcatctttatttgtggtatccgtagtatcccccaaactggaaacaactcaaatgtccatcagcaggtgtctggctagacggcagtgtagccatatgatggaacagtgctggccaagaaaaagaagtgaactactggtacacgcaactacatgaatgaatcgcacagtcatgcgcagtcccaaaatcatgatgcaagaagccagatgaaaaggcgtacatgcgggatgattccagataccgtatataaaattccggaaagtgcagtgttctctggcaaagaagcagatcaggggttgccagagacttgggggtaaggagctggggttgcaaaaggggcacaagaaaacatcctcttggggtgagagggtactttcccagtctggattttggtgatagcttcataggaatatccatgtgtcatagcatatcaagtcatactttaaatgtgtgtggtttattgtctgtccgtgacacttcaataaagctgcttaaaacttttcaaaagccatttgtccaaagtgttggtgcccaatagaactgtttgcgttgatgggaatagtgtgtatctgctttactgagtctagcaagtctctagccacatgtgactattgcatttgaaatgtggctagggcaactgaggaactcaatttttaacttcatttaagtttaatcaatttaaatgtgaagaggggcatgtagctattatctgtcctgtgggacatcacaggtccaaagcccactttccgctcttcaatgcctgcctcacacacatgttgtaggccgtgagctctggctcctggaggtggctggaagcttccagcactggaaggctgtttcacactctgatacccttgttaatgctgcagcctctgctaagaatgctcttaattgatacaatgaggtgtgaggtctttctacaactgcccacccttagacaaggtgttgcttggcctgtgcagaaggtgaataggtggtttgctttctctgaagctgtgctttttcctatttaactcttatgactgagcagcatttgctcgaattaaaatctccccacatttcaaagcgtcttttctacctctcaagtttctcataaattgggcatattcaaataagtgacatgatgcaggcaagcctcaggtaagatcctttggccatattgtatattacatggtaacaaaatggctttttaaaggaaaagctgattatcctcgaagagagttggattctgttaagggttttggaggtgagccctgggaagacctgttattttctagacctttgaggctagagctggaaagattctgcccagtgacctttggctgctccttaaaaatagctatgatgtaagaatcctgtctagcttcaggcttctagatgggatccctttgggcaagatcatttgacaaagcagaattactcactgcctaagtcagaaggcagcactgcagctccctggggtggggctgcacctccacactttggctggatcagcagctgttgatcagtggccagagaacagagagggtgacctgtgaactgaagggtgggggaaagtagaaagtgacagatctacaggcaaggaattttaagatccccaccaccaccatccacccccaccaaaaaataaaaaatattaggaaggacattgtgaagagatggctgtttggctggctctgttcccctcctctgtgccttctggcctatctttgtttgctcatcagctgtgacattagcataatgattttgttctttatatctaatagctctatgtgctgcctgccccactgactgaatcattttatttctacttgtgagatcacagacctttgactacttacttaccttgtcagacatatccaagtgaactcggggggaaaagctaagacaggaagtaggggtggggaaaggaaggattgttattttgaaagattgcctgggctgggtgtggtggctcatgcctatagtcccagcactttgggaggctgaggtgggtaggttgcttgagcccagaagtttgagaccagcgttggcaacatggggagaccctgtcttgacaaaaaataaaaataaaaaaattagccaggcatggtggctcatgcctgtggtcccagctactcgggaggcagaggtgggaggatcactggagccccactgtgctccatcctgggtgagaggcactctctcaaaaaaaaaaagaaaaaaaaagtttgcctgcttgttggtccaacgttaatagcagtgattaagattaataatttgtattcaggttgcactcgatgttttaaaaagccattttacataatatatttgttaaaagtgagtcagaacataagagaaagccctatgctttcttggtgctaaggaaaatattctggttgggttacccagggataatgtaattcttcccatagagcatgaaaatgtcattactcataaattgagactggagctgcctgagcacaagggatatgtaatcatcttctggctgtggtttccgtccctctcggccagaactcgaggatggctcgttcggctgcgggcctgaggctgctggacacacagaggaagcccagagcctgcccgccactcaggctgcagggcacacctgccgagaagcgcgtctggcccccacgcacttgttctctggcccagacagagaccagagtggccatgtcctgggaaattctccctgagccaccaggcgtgtgtgctgtgtggattgcatacaccaagcatggaaaggcagaggcaagcaggctgatgtccaggagtctggaagctttattagtgaagccatcgatggggattctatttatatttgtgagattttctttaaaaagtaaacacctttgttaagcatattttatgtattataaaaatcacccatttcaagtgtacacatcagtgatttccagtaactttaccaagtggtgcaaccatcacctcaaatccgttttaggacattttcttctccccttaaggaccctcatgttcttttacagttaatcccatcttcccctttgctccaggcaaccactgatctacttttcaatctctattataataatttattttctgattagaaaagtaatagtttcctattttggataatttaaataattccaaagagaaaaaccgtgaatgaaaccagaatccccctcattgacctggcaccaggcttctctctctccagctgctgccttctgctgactcctcgactgccacggctggcagggcccacaccagcacttcgaccaccctctatgccattccttttgcccagtctacccctgcccccacctcacgatgccccatcttttgaaggtctgtctcacatccactgcttaacagagatttccctggtatccaggctagaaataatgttctcttcatggaagttccatgatgtctcagtcctggctcctctggtatctaggctagaaataatgtgttttccttgaagttccatggtgtctcattcctggctctcagagtttccacttggtagtttacttacctaaacatggggcgtgtctccccattcacccgaggggagaggctgtctgaggactgaggtcctcactagcttgtttttgtttcctaactcatccgtacacccccctctcctgccaccactgcggccacatgtggctcctttacagtggtcatcagagctgtccttgcagcctggccaacatgatgaaaccccgtctctactaataatacaaaaattagctgggcatggcatggtggcgtgtgcctgtaatcccagctacctgggaggctgaggcagaggaatcacttgaacctgggaggtggaggttgcagtgagccaagatcgtgccactgcacacccgcctgggcaacagagtgaaactgtgtcttaaaaaataaaaaaaaaagctgcaattggttgttgagtgtctcattgcccactaggctgcgggccctgttcccagcatccagaggtcacactcactgctgaaatgaacgaagaacgaaagcaagccgaccaagtgggtctgcatgtccgtggagtgttcactcttctccacttgaatgtttttgctgtaggtcccaaagcatagttgatctcttctcaccctaatctattattaacagcacctaagttcttattggaattaaataacgaataatctcaaaatagatggataaaccaaattgtgatgaatttctttttctctgctgcagagaatcttgtttttcccactcactcgtgtacattcatgttcatgtgtgtactcccgcttcatgaaaaacctaagattctctttagaaatgtgaattttaacttgtggacacttttaactttcttccccacaacccaccttatcactggatggttctggtgcctttggcgctgcccccgccagctgccggacagcgactctaatcctccctgtaggctgccttctttcttgcacgtgccttgttctagaccgcacagcattggctcccagccaggcagggttcaggaccaaattgacctgcgccggtgactctgattgtggttttgtatgatcgtgtagatgagtgggcagtgagcatctcaggggttagtaactgggacagttacccttccttcttcccaagcccaggccagctggcctgaccacctaaaacctaagtcactgttttctcacctttcatcaatgaggagccattagtatctgtgcagtgtaaaatatgctactatgtggtattcttagaattttacattcttggtgtgtatgtacataattcttcctctgaaagggcaggcatcgtgtttcatttacctttgtaaatttattttattttatttttgagacaaaagtctcgctctgttacctaggctggagtgcagtggtgtcatcttggctcactgcaacctccgcctcctggattcaagtgattctcctgcctcagcctcccgagtagctaggattacaggcgtgcgccacctcgcctggctcatttttgtatttttaatagagatggggttttgccgtgttggtcaggctggtctcgaactcctgacctcaggtgatctgcctgcctcggcctcccaaagtgctggaattacaggcatgagccaccacactcagcctcctttgtaaatttacctactgttgctgtatgcaaaataggtgctcaataaatcacttgaatgaatgaattcacacatgcatttgctatattatgtttggtttaaggtgttaatagaactaacattttatctgaagcccctgtagattctgtctttcacatattcgatgcccaaaaaaatatttcagtatactgatttcttccatcaataatttttaagcctctattctaggccaagccccatgctaagagctctggtaaatataaaatacaataaaggtggatgctaccctttagaacttagtgtgtgagatcactaagatgaacacgagaagagcctgccaagtgccttaaaacatttagaaaaggggctgggtgtagtggctcatacctgtaatcccaggtctttgggaggccgaggcaggtggatcacttgaggtcaggagtttgagaccagcctgaccaacatggtgaaaccccgtctctactaaaaatacaaaaagccaggcatggttgtgggtgcttgtaatcccagcaactcgggaggctgaggcgggaggatcacttgaacctggaaagcagaggttgcggtgagccgagatcacgccactgcactccagcctgggtgagactccatctcaaaaaaaaaaaaaaaaaaaaatagaaaagaaaatattggaggatctgggggagggagggatcacattctgctggggttgcttagtagagaaggtggcgtttgagtaactcctgatggatgagaaggctttgaacagcagggatagggaagacgtttccgtcgaatagaacaaattgagcacatgcgtagaatcagggaaggagagagttcagtttggagaaatatgaagatgaaacatggaaaataaggatggattgtggagagtgtgaaatgcaggaataagtagtttagtctttattagggacacaaccccagacaagcctgccatagccctgaagcggggagtggggcaggcagagactaggaagcggcagcagggagcaggggaagccatagccttagtcctgagaaggagcagtgaggcgcagccaaggcagtggacgtgagaatggcatggagggaatgttggaagacgggtctgcgtatgtagggttaagacctggaatttgttgagaagcgtgccgcacggctgggtggcagcactggggtcagagatgactcttgggtgtcaagcaagtgaggagggtgggagagagggctttgtaggaaggaagagcattggaggaaggagagctggctgcatacttggggctgcctgcaagtagagggaaatgtggccctggaggcgggaactgtgacgggagtttcattcctcactcacctgtctggctgccaggactgtcaatgacagtggaaatctaggcgtgcttgctgtcgtaggttactcatcagcacggccttctgtttgtccttgttccttccagtcgttcctaagaccgcaccttaaactgcgcttttcagcatttaaaaatttaatgcttaaggctgatcttagcaagacatagctgatgacattgtaccttggaggaaggccaggtacgtgagaaatgttgagttgtttaatcctagggcaaaagttccccaaaaaagtttatttctgaaatgacagtcattaattgatcatttatttagcagaattggctgtggatgcagacgttattatacaccttaccagtgttttccaagtacatttctgtttctaatgtaaaatttagtccaggcgtggtggctcatgcctgtaatcccagcactttgagaggccgaggagggcagattgcttaagtctaggagttcaagactagcctgagcaacacagtgaaaccctgtctacaaaaactacaaaaaaaaaattagccaagcatgttggcccgtgcctatagtcccagctactcaggaggctaaggtgggaggatcgcctgagctcaagaagttgaggctgaagtgccctccaacctgggcgacacagtgagaccctgtttcaaaaaaaaagaaaaaaaaattagtacactgaatggtgtatagaaatcggatgccatattgctttaaaagtggtgccattttatcttcctatttaagataattatactaaaaataaaactttcctttgcttgatggtatgaatgaatacataaggtcccaagtccctcttctcgtccttctccttctctgggcctgtaatctagaagcccagagtgtcacagaagccacaggggcccagcagtgggaactggcccttgggttgattcaggggagtggtccaagcctgggaagtgcgaaagtgggtttcgagctcgttttccacttgagggagggaatcttttcaggctcagggctctgagtccgtacttgaaggctcttcctgactgaagtttcgcatcttgagttgactcgcatttgaactgctgtcacggagacttgcttgctcctcgtgtacctgttggttaggaggcttccattccacccaatttaatccatgcggacggtgtgtgtccccactctcctgccttcttgcttcagggagaagaatgggggcaccaaggctcttgcccttcctgttcccttttatctcctttgcctagcaacacccccccaacacacaccccctcacaatcacaccctcactctcacaccctcccacacaccccccgtcacaccctctcatgtccactctcatacactctcacaaccacactcacacaacatgcaatcattcccaatcactcacatccacactccacacaaccacacaaaatcacatccacacacacactcaaccacactcataccccacgcaatcacaaccacacaacacacatcccaatcacacccactcacatccacactctcaccacactcaacacacaccccacgcaatcacacccactcacatccacactcacacaatcacacaaccacactcatacacaccccgtgcatcacacacactcatatccacaccctcacaccctcacaatcacagccccccacatccactcacacaatcatatcttcactcacacacaccctcacacaatcattcacattcacccccaactcacatccacacacacaccctcaaacacacacatgctccctcacacacctacacatactcacattctcacacacacatgtgcattcaccttatactcagtcacttacacccttacacacccacttacacccccacaatcacaccccacactcaaatccacacaatctctcacatccacaatcacactctcacacacccacacacccgtacacaatcacattcacgcactcacatccacaatcacacccacacacacccatacacacatttacacacttacacaatcactcacatccataatcacatcctgaaaccctcacacgcccacacacacccatacacaatcacattcacactcacatccacactcacactcacatccgtacacaatcacaccctcacacacccatacacaatcgcattcacacactcacacaatcacacccttagtcccttaacatgctccctcacacacctacacgatcactcatacccacattcactcacatacaccctcatgtgcattcactcttatactcaagcacagtcacacctttacacacccacaacaccctcactcagtcgtacacactcattgacacacactctccgtccccaacacacacacgtcttttctcattcgcacccagcattcgctcgtgtgcctttgcagcagacagaagactctgcctttgtttcccctgcttggagcttgctgtggagactggggcctggggcccagagcaccaaccccagtacagtccagcttatgggtggagccgtgattgagagtcagaagtgggggtttccttttattctaggctttcgacgtaattctgtcattgaatgttttgaaatattttttcttcactgcaatgattgtctctttacaaactttctagcataacaatataagattgttactgtgaaatatatacagacctagacttttcattagccctctattcatttgtaagatgaaattgttacaaagaatgtatgactgaataaggcacagtacatgcaccggccaggttttaggtggaggtgaatcattatcaaatgttctctctaatgtccttgctgtccttactttagattcacaaggaagctgaataagaatctccttttgtttttgttttttagattcagaatatgaacaacataatctccttccctttggacagtttgctgaagggggacctgaaaggagtgaaaggggtatgacattgacactgtgacaccaggggcagcttttacaccatgtagagtcacagtagcttggcctgccgggcagcagccacgccagtacgttctcattgggacgataggatggctcttttatctcagcttcctctgatttgccatcttgggaccacctttcagccaaaaaggtggtgacttctggcctttctggccgtcctgttggcacaacaaagttggtgaggggaggagactgggaagggaaagaaaactgctattttggaaaaagtaaagagtttcggtctctccagggagcagggaaacctgtgggaggagtcgggctttctagctggcacgttgcccatttagcactgggaaaggatcctagcaagggtgtattttcctgctgggaaggtcgcagtcgtcaggcatgagccaactttgtctctctgtccttcagaggatgttggctgtttaggacatgcctagccaccataagcacgcaggccaggagctgtttaagggggcagcagacggggctggaggggcgtttgctcatgagcacgcaggccaggagctgtttcgggggcagcggacagggctagaggcgcgtttgccaggcagcgcgctgcccctgcgcatcgccagccctgacagacgtgcaccacggaagggacgtgattgtggctgccttctcgggagactcaaattctttggatctgcgcacgattcctgggtcccatcggggatgactggaaacccagtcttgacccatctccaggacctctacagaggcctctcagggtctccttcacagagtgtgcccggagagagctgttcagacacattccccatcgagccttcaggggcttggagaacaggtcagcggagttagcccaactcacgggcgggaaggcatcccaggcagaggaaaggcgcaggtgcgcacagggagcagggctcagtgctgcatgtcaggctgccagggtgcaggaggagccagttcgtgcagggacttgtgtgccaggctgtggcacttgggccttacctgaggccattgaaaagccaaaaagtagtcaacagcaacaacaaaaagatttctgtctccctgaagaacccctttgaagggagcataaataggtgaggaccattcaatagaatttccagtggctcagtagtttttgaggcaggctttaccagagtgtatgaagtcctgaattgcacacggaagagcagtaagagaccctaggaggatgtggcggcctttctatttctgtcgttgggcttaaagcagggttagatgtgatgagattcatctatcaattagagttcctttcttttagagagacatcctgaagtatttgcagatgaaaggttgtctttcaggatttactttcagattaggcccagggcagggagtagggcacaggtgacacaaggtggcccaagagtgtcataactgggtggcagcaccttgcttttgtgtacatttagtatattctatattattttaagagaaagaaaggaaatgccaccactggtctacttaaaagcatgtactcttggttctttatttttcgtgggattacatacgtcatttattgcagaaattaatgctcctttcagggctagtacagggataagtaagtttatcttgcacagaagtgaatgattagtcttgcctaatttattattctttgtttacaggatctgaaaaagccttttgataaagcttggaaggactatgaaacaaaaatgtgagtgttctcgtttttaaatttacgtataggtaatttgggatttcaaatttaaaccaacctcgtattgcttaaagggattgtccaaataaaccttaatccagaaaagaatgtttatcagccatgttgctgtggttcattttgatgacagatgtgtttggtgatgctgtcttcttcttctaatctgttttcttctgttcctttgtctaagatgtcatagtggttataggatgttattttcaggaaagttcattgagggaagttaagaccaatttctcttaggaggtatttctttctgtttttgtttttaaacactttgtccattccgttactgtttttgatagcagggcagttttcagacttcatcttcctggtgatttgtgaaagctgcttagctttgtatctgtgtttctctgaaataccagttcccttggttttagaaagagggttcaatacctgtctccttcagattcatctgccaaaaaataacctgaagaatggagaattgattcttggatgtgaactacggtttctacaagaagtagaattggtttcctgacccgaagtcaaccaatagacaagactctgttggttgacttcaggcagttgtaacttccccaatcacagtttctcatccctagagtagagagagtcgagctacagggaattgatcaagcaagtaattatggggggaataatggcttcaattattttaaatactggaaagatatgaaatgtggtgtttactttgtaatctctgtgtcttggagtgctctgaatggaaatagaaacttccatatgaagctatctgttaaactaaaaggtgttatgaggaagtcatttcaaatctaagtacaagtatttcattagattgtttaaaaaaaaaatagctcaggatatctttccagtggtgaaggatcacaaagctcaaatcagtgagccccacacctttgatactccttctatccatgggaatcttacatttccatacccgaggttgcttggccccgagttctggagtttcattgatggtgtacattcattcagaagcacaggcagagtgttgactagagaaccctgcaggtccattcagcccagggaggcccccacccaggatccctggtccgtcagcatcctttatttgtgtgccagttgggtgaaataaatgggaagggaccagcggattcctgctttgcagagggaaaaccaagagtcagtggtttctgcttgtcagccagtaagagtaattgagccaggccaggaagcagctttcccacttcactcagcctcccttgctgcccgtctctgtggctgataggaaatggtcctgtgtgtgactagaccaagggcagaaagggctttctgaagaagagtgcctgagagagtcatctggttctgaaaagaaaaggtttggaagaaggataacatcaaattctgtaaaatcgagacacacatgggtaggatggggacagaattcctcacaaaaccctagaatttaggaggagggagcagcaccctttaaacttgaagtaattgtaggataaataaaggaaataattctttattaatgtgggagattcatttatcccaagaggttttgtgatatgtaacaaccataataggttttagatgtctttaaaattcctgggcagtagtcccatacctgattattaagagaaatgaccagtgtctggacggtctcttgcctgtgaaggagtgtcagcgacaccttggagttgtataattctagtcccagggaccctccagtcacactcctttccggatgcatagactcattaaacaacaacatccctcccaaagggtctcctgtgtgtttatttttcactcattcactccttcaaattattgagaacctacacagtgcaggacacacagagaaatcacatttcttgcctcttcttaaacactctagtcctccttgccctaatgacagggagccctctggaaccctgagtagcccatttcatcactggatgcctttgaaagaacatgctacttgggtcttctggtgtctacttcaggctctacagaaagagctgcttcccttgtcttcatggcagccctttctgttttttgagtgctttctgttggttttgtttagtctccttttctccagaataaaaactcacggctatttcaagcccaccttagcagccacgattaccctggtggctcttctttggatgtgctcattggtcagtttttaccctgaactgcacactcgacatttaggtaatacaggttaggcacaagatgaatgtagaaaggataattaagccgacagcatggaaaggtggttggtcgtcttctacagtgatgagcggtgttgtaggtcaaggcagagagctggcctggcttcactgagtgaggaggtgatgacagagactagggaggaagtccaggaggagaaacagtgggtagggaagagtcagacggtgcccttgggttactagagggcaggaaggctctgaatgctgatgccaaaggagccctccaagccctgtgcagacttcctacctcctctgacccatacctgactcaaagcaggtgcctaggaaatacttgttgagtaagtgggaagacccggtttgacatcttcgtgaggacacccattttccttttgagggagttgagaggctgcctgtgctgaaacgtgtggtgagcgttggtctcgccaggctgggtactggggtggcttcaaggctgtcccgttgagttctgtgccaacaggcatcttgatgtatccttgctttcacacgtagaaccaagatagaaaaggagaaaaaggaacacgccaagctccatgggatgattcggactgaaataagcggagcggaaattgccgaagagatggaaaaggagaggcgcttcttccagctacagatgtgcgaggtaaggcggtggtgaaggcaggtcctacagcccaggctgtgccggctctgccctcacctgtgggagcatctcaccggtaccagcggcttcagagaaaacaccacatgcattgctggactccctttgcccctgtgttgacatttcttttactagggaagcgttagcctcctggagggtagaattaggttactttaacaccaacattttcttaaaagtagagaaaaaccactaaatgtctagaatgttctttctggcttcacgtacgtactcttgctaaaatatttattccttgggtgtatttaaatgagatctctgagttcccttgtaccaatggagtcagtgactggcttgtgggagggtgagaagtcagctgaaaacaacatacagcgatgacagaccatggcctgtgtcagtgtctgtgagtggatgggaagtccagtcacctgttttgacttcctgctagacctcacctgctcaggcgggggcactcatctagcccgaaggcccaggtggcctggggagcgcctctctgctccactccattccacccgcagcctcagcccttcccttagtgaggcggagacagcaggatggacactctcagagcatttctctgagatcagagaccatggattatgaaggcctttgctcacagattttttatttttgtgccttgcttgccaggtacgtgtatacaaatggcacatggaaacagctgccacctctgcctggggttaattcctcctggcagtgccagcgaagctcccttgcactggatggtatttgtttccctctcatagcagtgcaaacttaggtttcaaatgtacacaatgtgtgggtgatgtttgtgacaggcactgaaactggcattggccagctcttaattccctctgagcaatcaacaacaaagctaatccagaaggcactttctgattttggaatgtatgtttgttaattgtagcaggagcttaacccttataaatacatatatcttagaaatgtatttaaatgagtttttattcccagagcagactcttaagtggtcagcagagaggaatcagtcccaggaatcagggtggcagttgaaagttaagtccattttgtctaatgttagaatatctacttatcttagcctgttttctgttgctataactgaatacctgagaatgggtaatttataaagaaaagaaatttcccagttctggaggctgccaagtccaaggttgaggggctgcatctggtgaggaccttcttgctggtgggcgctctgcagagtcctaagtcagtgcaggacatcacatggtgggggcctcacaagagacagccaaactggctttttaatagcagacacactcttctcataattgtaccactcccccagtaatccatgaatggattaatccactcatgcagtgacctcccaaaggttctaccactcaacactgctgcattggggacccagtttccaacatgtgaacttttaggggacacattgaaaccatatcaccactccagctcttttggttactatttgcacccttttacattcaacctgtgaatctgaagtgtatcacttatagataatatatatagctggatcatgtttttcttatcagtttgacaatctctgcctttcgattggattgtttaatccattaacgttgaatgttactattgatatgattggatttacttctgttattttacttttttttatgtctgtctcgtgtcttttgctccttgattcctcctttaccgccttgtttttcattgagagaatgtttagagatattcactagatgaaaaacaagcaaatatttttaaatattcacttgatgaaatgaattctcaagataaagcctttaattaaacttaaagggttcttatagacaggagaatggatgtttttatacacatttttttgtaaacacatatcatgtgtagtgtaagaggttgcattctcaaaagaaaagcacataccatgtataataccaccttcctggcctacctcatagagtggcagagaaatcagcgagacagcatgagacagggactaggaaactgctgtgtgttatacaagcacaaagtattggtttttgtttttgtttttctcaatcctgcttctgtaagggtattgtttctaattaagtactgtagtagcattttacaaacaatcagggtgaaattaagtagtagtgttttacaaagaatgaatttggaaaggggtgtttgtgttcaggtcatgctctttttggttagtaaagtagacatctatttacctaaacactttaagactacttaaaatgcgtactgaattttgacattcaagtagtatgtgaaggtcatagccatgacttgaggagtaattggttccccacttggctctgtcgttgcttcctgtggtatgcaccttgcactggttactacttctcttctgtatccaggtgaattgatcctgtgaactgactaagtcatttattttaatggaaatacactgtgtagatgatgcctctaagtcatagacttgagccatctttcgagcagtcctcaggtagtgctgggtcctggctctgcagagctggcacttggaggggtcaggcactaatgtttcacagttgagtgagagctgtactatatgcatgcataaaagcagaggtgggcttatctaacagtaaactcacagttttcacaggagaagacatctgatgaagagtgtagaagttggccagatagtcatgggccgtgaaggcctttctttccatgggtgagaaagatcatttgaaaaacagttccttgagaatccaactctgaagtgaattagattgcctgcattaaaatcatgttaaaaggccgggcagggtggctcacacctgcaatcccagcactttgggaggctgaggtgggaggattccttgagcccaggagttcaagaccagcctgggcaacatggtgagaccttgtctctacaaaaaaacaaaaacaaacaaacaaacaaacatgactttaaaattatttgactgtttccccaaactgaagttctcaagctttaagtgcttgctgttgtttaggtgtttaaaatttgagttgcccaggatctaatccagaagagtggctttcaggcttttattttaaagctatggagccctttcttcaaaattcatttaataaagaaattcagtatgtcaaataggtagtacagaccttctgtgagcggagaaggcgtgagaagatcctctgttgctgattgtaaaaatagtatatacttttaaagaaaattggttaatataagaaaatatatataaaaggaattaaaaatcgcccccaaattttacttatccaaagataaccactttgacatttaagtaaacatctttatatgtccctatgtatacattcaaaaaaaatcgtataagtagatctttcgctgctgatgctttataacctattttcactctctagtatgttgatgtccatgtcagaaattttgggttttattggcttagtggccgcacagtattttctgtatggatgcaccatatgttaatttcccactcattaggtttggactgttgccattgtttacttttataaacaggatagcagtgtatcttcttttctgttcatctttgtaaacttttgtggttatcttcttagaataaattcctgggagtagaatttctaggtcaaaatgtacatacgtttaaaaatttgatacattaccaaatatttaatatcaaaaagaaagagggaaagaaggacctataggtggttgttacaggcagaaggacaatttgtagcttacagtttcacagcagctttccacctcctccttgggctgcagagagacctcagccagcaactgaacttgggtacccctaccccacccccgcccatcctttacagctgagagccagggcatgaatcagcagcttttccaggggacattccatttcagagatcatcttctgacagcggaggggatggggactcatgaagtccttctatttcctgacactggttttgtagctccctgaggctttctgatagcttcgtggtcactaatgaattctccaagttaaaaatagctttaattcatttcaattaaactttgtttttttccaacaatcacattattttccttgtaagggaaatgtctcaggacgagagacatgatgccaagcatctcagctacaatacgttagcagttattgttcctaaagtaagggaccttgggcaggagtgtgtttgagatggttagaaatcccatttatttgaaccatccatagtcttccatgtagctagagtgaagatttctcctagcaggccaggatagactgtcttattattaggagtttttggcacttcaatatttaattatctgactgtcagataattcatatggccccaaaataaagaaacggttacggaatccaggcgatactaagtgtcgatcatgcactctacgcattgtaaaagatgccaaagaagtagaagaaatcatctcagtcctcagaagctccttttaaactcgtattctgcttacttccatgacatttccttttcattgttcaacagtatctgctgaaggtcaacgaaatcaagattaaaaagggagtagatttacttcagaatctgatcaaatactttcatgcccaatgcaagtaagttcttctctgttatgttatcttaaatgtttgttcatgtgtggcaacttctggtagatctatagatagctcataggaaataaacaccacttagaagtctatagtaaagggaatgaggtgctgactcatgcgacaacacgggtaaacattgagaacacgttcaatgaaggaagccagacacaagaggccatgtactgtatgatcccatttatttggaaggtcaggaataagtacatccacagagacagaaagcaggtgagtgattgccgcagcttggaggaagaaggaaatgggaaatggctgctaacgggtatagggtttctttgtgggatattgaaaatattccagaagtgagtgctaatgattgcacaactttgtgaatttactaaaaatcactttaaaaggatgaattttatggctttatggcttagggattatatcttaattaaaaataaaagcatatatacaacataaaaaatctgtagtaattgccagatatatttatttttggctctttttgtagagggacaaactcatttgacctattccgcaactctcagatgtttgttaaaagagaaatgatacgatgttaatgcagtgttttaaaataagaaaacacttttatatattatcctgtggagccaatgactgtgatgagcaaaggaagatgttagtagaggagaaggagaggattccacgtgcaggggctgctcaagtactcagctttgccatctgtgtcagtacttcagtctgacccacgtctctgacctggcttctgctcctcgacccccagtcactgatatagacaggcctctggctccttcactcacccacccaacacacatgtcaggtgctggaccagaggcgagagacacagtgatgtacagtgctggcatagttcctactcaaagagtcaagtagggaagttagactgaaagagacaaatttctaattagatgtttacaaaattgttttaaagtataggaatctaagaaagaatataatacagggacctgatttagataaagatttagggtagagttttttgttttttgtttttctattttgttccctgatacagtctccaacagccagcacacagtgcccggaacacagtaggtactcggctgtttcttgaatgagctgcaggcctctctgaggagacatggatctgagatctaaagtatgagtaggagccggcagataaggagtgggggaagaacattccaggcagggtctaggtcttaaggcaggaaaaaggccaaggtgacataagctcagtgaaaaaggagagtggcgtgaaacgaaactgcatggaaaagccttagggatgtggatggccccagacatcttgcaaaagtttttagattttatcccaaatatgttgggaagctcttgaagaaattgaagcagaggaccatttgtatgcactcctgtgatctgccaggcgctattaggggttttggtgatgcagtaaggaggaaaacaaagttcttgccttcacggaccctggggtctcatgggggaggcaagtaggaaacacgagccaatatttaactgagtttatgaaaaggcaaaacagtgatggggagagagacagtggtgttggttagaagcagcttcaggaagcttctcggctgtaacaagattactctgtgtgttgtggagaaggaaccaaacaggacaagggtggatgtgggcaattgcttgtgtacacagctcctgtccctgtgcagaccagagatgacgatggcccacctggcttcgtgacagcgggagtggaaggtgtggactgacaagaaatcttttccttgtggaattgccatgcctgtctgcttaccttcccagagcaggctgtgccaccagcagcctacctttgtacagaattgtttcttttcctagaaggcctctttcctttgtgccctccctgtcttctgttcctcctaggacccagcttatggatcattcctgctttgcgatgcttcttccttttggaattccttttcttcctcctgtgttgccaccacaccgtctgcttgtctccatgatgacatcttccttgtgtctctgtgccactgaactatatgctcttaaggaaggggccatgccatttatttgttttatatctacagtgtgtggcacatttacctggcacgtatttgcagcagtgaattgcactgtggaattgaactgagctctgctttggaattcttaatacagctttgatgatgttgcatttctaaagcacttgaggtcaggcggcaaaggaggatgtgctgagtggttcatccaaagttaaaagagagcttcagccatttaaaaaaaagaagagtgaaatcatgtcttttgcagcaatagggatagaactgaaagtcattatcttaagtgaaacaagccagccgcagaaagacaaatatcgcatgttcccactcctaagtgggtgctaagaaaggcatacccatggatgtagagagtagagtgacagcagagtctcaggagggtgaagggagtggggatgatgagaaattattaatacttagtaggtacaatgtatgttattctggtgatggataccctaaaagccctaagttgaccaccaggcctataacaaaactgcacttgtaccccatgaatttatattaaaaaatataaaaagagagctcatctctacttggtggaaaagaccttgcaattatatagttttcaagatgaattattttatggagactcaaaattcttactttgtgatgagcatgcaaattacttctacagttcttatgtcaggcaatttaggaagtgggtcgcttccttgctgatattttatttttaagaagaagctattctgggatttccttcccccgcccctttattttgcccaaaccagtcagttgggtagcaacagaccacttgtggaaaagtgaagtagttggccttttatggacatgatcccagtaacctttaaaaatatgaatcttccattacttcgtttttggatatgagagagagtgtgtacgctgcctgctcttcaaatcagtcaggcagctttgactttctcaattcacattctggagggtacaacgtggagctcgagcaactcagctgcagagtaagagctcgcagccgtgcgtgtttccacgtgtgggagcgcctctcattcccccaccacacacgcccagtttccgcttctcgcccccaagggcacagctttgcctgctgggtgctgtgccctgctgggtacacgcgggcctctgcacactgctgtgctccgccagggtgaagaggccactgtgtaaaccagattccagggctcaggtttggctgttgacccttggaactacgtagatatgcgttattttgctttttcttctcgctttaagtgttcttaaagaatacttcgtgttcttttatttttatttcatttaaggaaggaattttcatctctacctctttcctggaatatcttgaaaacttgtcttattagtctttgctcctgaacattgaagatcctgtactctagcggaatctagaagtagggcattataacattataaaataaagacagccatggtttggcaaggcatggtggctcatgcctgaaatcccagcactttgggaggccaaggggggcggatcacctgaggtcaggagttcaagaccagcctggccaacatggtgaaacctggtctctactaaaaatacaaaaattagccggatgcggtagtgcacacctgtagtcccggctactcgggagactgaggctggagaatcacttgaacccaagaggcggaggttgcagtgagctgagatcatgctgctgcaccccagcctgggcgacagagcgatttttttttttcaaaaaaaatacaaccatggtttgaaaggtggtgatgaatgttgaattgacttgttctttgagccaatacctgctggaaaccactgtgaccagctgttgctcagtgaacttggaatgcatggtcaagataaggctcagccccggatgctgcagaagcttgcagaggagggaggggcgggtgtcacagacagaccccatcagcagacaccgcattggaatgtggtggcgtgaaggctgcaggaggggccctggcacggtgtgtggggcccagagaagaaaggagctactctgcttggtgggtttgataattgcctctaagtgggtgtattttaaaggatagaaatacaccccttctagcctggtgaggcaggctagaaaatgtttaatagacaacaaaatttgattgggtaatgttgatggtaaaagttctgtgaagcttggaaaagtgttaatgggctcaacttaagaaaattttctggggctatgtagttaggactgtcatagggacagcagccagcggagaaggaatagtgttccttttcttgaagcttctcctgacgccagggctgactgcactttgaaggggcgtctgggtgccaagacacacctcaaggagggtacgggaaggtcagcactttgaaaaatcagagggaggagattttccaggtaggtggatggtgaagattggctgggctattacagagatgaaatctaaatctaaatccaaattcatattgttattccaagtacaccattcatcgtcatgctggaaacagcatcctgacgagaagtctctgagcacttgattccactacggggctcatgctcacgcgctctcactctcgctctctgtctgaccgtagggagaattgccaggtcgcaaagattcttggagctgtacacctgctccctctccctgggtggttttgcatttatcacctgtaatatttttcctactccttatcttagatcttagagatctctgtcctcctatctatttcacaagaatttgaaatgattaagaaaatagttacataaagaaaaacacgtaaataaaatacaagaattagatgagttcagaaacatattctatattcagaaaaaaacgtattaaaatacaggaacaagagtataaaataaagaatgatgtgtctgtctaaaggtgaatgaaaacattctagcatcctgacctctgtgactcctaataaacactggtcagagttcatgccccacggcctgtgtgtccctctccttcctccttggagttgctgcattaaaggccacgctgcagtgttttcacggcgccttctgtgtgtgacgcatttggtctgagaaacacccatagagctactgctgagtttaaaagaagtaaacatcacctcacatgacatatgtgaaacccagatcactttttaaagatagtctccttggtatctaataaactggctaaagttggtgacagtccatccttcattaagttattcattcaataaatggcatgtgcttgaaatacaccaaactttgcgggtactttgtgtctcctagaacttcatatctaatgagggaattctgttttaaacaatcacactaatgaatacataattgcagttacagcaagtgttttgaagcaaaatacaaaatgctctgagaaagtataagaaggcctcttataggggaataacttgtaggggattatggaaggcctcactaaccggggatgtttaacctaaaacttgaagaatgagtgggaatcagccaggtgaagcagacacaccttaggagaaggctttagagagaagaaacagaatgcagagggccaggggcaggagaacttggtggtcatggaggaagggagaaaaggccggtatgtctggaactgagtgaatgaagagggtggaatggtgtggattgaggctggagctgcatcaggcctcattacaggttagaactttctccttagctcgtggaaatgcccgttcttcattcctctcaaaagggttacacacagcaccctccagaggcagcactgaacaccagcccatggctccagcagaaaaacttgtccagcctctgttgtatttcctgaatcacttgttataggtgacctcacagcattgagttctcagccttaaaataaaaaattcctcttgatatttgatctcaagttctctacccacggtttcctaccccgcagacacagtgtggccaccaaagctgcttggttggttcttttctgcattatttctctctctctctgtctctgtctttctccttttttttttttttttttttttttttgggagacagtctcactctgtcgccaggccagaatgcagtggcatgatctcggctcactgcaacctccacctcctgggttcaaacaattcttgtgcctcagcctcccgagtagtagctttttgtatttttgtatttgttttttttttttttgtatttttaatagagtatttttaggggttttgctatgttggccagctggtctggaactcctggtctctagtgatcctcccaccttggcctccccaagtccctcaccctgggattataggcatgagccacagcacccggcctctgcattccttttcttttccatgtcgcggtcgcctgttgcggcacattcttcagtgtcttccacttgcgccccatggcctttctggcttcagatgcagaacctctcccgttataaactgaaactcaaggcctcattttatatgggtcgagaaaaatctcaaatacttaagcttattgcatttccttttctgttcgctcctgctaattttgagtgtcattttattcttggtttgcctgatattttaaggttctgttcatacagtcttttcccccaggagttacataatgacttcagtcactttaaagaagtttttaatctgtctgacaaaattattttttcctttgtgaaatgtcatctctgtttcttctttttcctgctagtttttttcaggatggactcaaagccgtggaaagcctcaaaccttccattgaaacgctgtctacggatcttcacacggtgagtagcttccctcccactgtggtttaaaaccatcttaatgcaacagacattttcatctaaatgtcacttctgtgtaatcctgtgttttcatgccgtgccgcccacgtggagtgtggcgttcccacgcctgtcctctgtcttggtgggagggaaggtttgaccagcgagggaggcagttgtcgcattgtgtggaaatggccccatgagcaccaacgtttcactgtacctcagtcttaattttctgattggttctgttgtgtgtgtgtgtttttaaagatcaaacaggcccaggatgaagaaagaaggcagttgatacagcttcgagatattttgaaatccgcattgcaggttgaacagaaagaggtgaggggatttaattttgaaagattgcagttttcaccccattcttggaggctttgggtctgaagaacatgaagttcatgtcttctaggagctcacagttcactcgggctgtgtcaggcaccagtaaaacatttaatgtattcttgcaatttagttctataaaaccatcttttaaaatatgtttatttcaggaggaagcatttactacatgcatggccttaatggcggtgtataaaccctgtgctctgtcagttgctagataaggagctctcagtggcttcgtcacagagaccatgtgtcatttgtgctatttatcctgtacctggccctgtgtcatttccctaccctgacatacgtggactctgcccctttaggcctaggcacgtagcaggggaccagctggggctctgccagccctgagattgtgttctataaaatatgaggcatgagcttttcttacagctgcctccatcatgacaggcagaaatccttagttctcttacttcccctctttctgtaatgacgtctctgtgtgctaacacgtcagcagggacagtttgtgttgtggggacttgtttttaaaaagccattaaaaagtaagttttaaagataattttactatattttcactacaatgtgggtatcataatgtgaatttagtataaatccatttccttgttaataaaaggaatgtatctaaacatatatctagtgattttagagaaattgctaaactacttgacagcataaagttccctgttggcagtttggtgagctctattttattgtaagttcttgtactataactgaatattgttgtttttctcccaaatgcgtttaccttttgtgaccgaagtctaggagagtaagtagttcagtattttaataaattgcagaattttgcatgttttattcgtgaacatacatatatatattccttttatatattaatggttagtagcattttttattttaacccctcacctttcattgttgtagactttattaaaggctgaagagtttgcataaatattagggaagtggacattttctgggtttacagtttacacttttgctgctgttcctttatgaagatgaagcaggtccctccctccctccctttctctcccctgagtggctgaattctacacatctctctagtccctctgaagccccacctctggagcgctgcctctgatcaccccagcccacagtgatctgagttcacagagcacatcctgtttgaatgccccatttgaatcacagcctattcctctttttgagtgttggttgtgccttaagtgcacagatggcttttcaccagctggacctcgagcagcctgaggatgccaccctgccttctgagccattcttccatcacactgtagtgccacagcgctcatttagtaggattttggtaaacatgggtcaactaagtgagacactggcagagcaaggttatatttagtgctagaaaggacctacaacatggtgacttcctcctagtctagagaatgtaggccctgacgctttgatattcccaataagcaaaaaaaggaaaaaaaacttggcgtaaggagaaaatagtgggctagcggtaacgaggaggaggtagtgcgagggcaggagccagaatgccgtccaaggtggctgctccccagcgcaccgttggaaatgatcgagaactgcctttgtctaagaaggaagatccaacccatgaagcaaagctcaggtttaaaataaggcagagcagctgctggggccaaatggccctctgggcacagtgcaaaggctgtgtttgctttgcctgtgcagaattaggaggtttgggaaaacgggctgttgtgagagaactggttatttacagcttcgcaggaaagtaataacaaatttaccagcacagaccagaagttctttatagtttgttgttttttgttaaccagcccatctgcccctgattgcacagagggatcaaatgaacctcctttactattcttctttggctgtctgcccagttggctccttgtcaagacctaactcaacagtctcctagttgtgggcgtgttgtgttttctgtgtatcatgctctgcgttgcttttaggtgatggcattcagcaagttggacaatctttgaacacagttgcaagtaataagcagatgtgaaaatgctaaattttctgttttaaaatgatttttatgatgggggttccatcttgtatacctcaaatttgcaataagaattgatcatttggtcattattgtttaggccgtcattccctttggttggattttcttctgtgacttagacaactgaaggtgttaagaggatttttattcagtgttataaaaattctaaccctccctgtgtaataacagttgatagaaattaagtaacatgccccaaagaaactgccttgatggttggtagaagccagtgctcctcattctcttcctgtaaatcccaagcatcagttattgaaggaatgaagagtggccattccagtgtggtagcttcgtgctgctgtttccttgtgaccctgcagctttgttttagtgtggagcttgtgccgttctggtcccggtgacctcacacctcccaatcactggccattcatgttttgttcttgatattttctgctctctgtaaggagaatactactctttggtatttccattatttttctttgtgaaggttttcatacttggagaaaagttgaaaaattgtgcagtgaccacccatagtgcaatattatacaatgaggatcgaactatgtaccatagtgtttgatttttggagaagatcctatttacacagttaaactcgttggcactgctcatctttggttgagctctctccccgtcagcctcgcctcctgccttccccatcccacgtcgtccatccgatggtgttctgccaggatggaccctgttggggtgctggcggagtcccaaagcctcatcacttgtgtgcaggctctctctgctgtttgatgtggagaacccagacttgtgtgcttctatggggaggatcaggctctggggcatggtctcacaggtctgagtgctgaaaccaccatggttttccactctgcagatctcaagtatggttgctctctctctctctctctgtctgtctgtgtctgtctatctctctctgtctgtctctatctctctctctctctctttctcttgctccctctttttcaagcatcctgtctagtaggatgtgatagaacagtttgtgccacccaggcagccaaggtccaccacagccataattttcttctgcctctgggttcgcgtatcttacatgcccaaatctggccttcatcacagagatctctgccaggggccacctgcctgcctctcctgccaagctgctaggtagcctggctctggcctccatgtcaccctcagtggaggactcgtttgttgattcacacatccagctaccctttcttccactgttaccctaagccagcactccacaaacacaacagaacaagatggatcaggttatcatctcttcaggggatcatgctctgggggtggggacagagaagcaattggggtgcagtgtaatgagagcactcgtggacatcagctccaggaagcagtgtctgcccagtgcgggctgggcaggtgccatcagggatgacttcccaaaggctgtgatacctgggatggagcttagaaggatgattaggagttggcaggccaggcatggtggctcacagctatagtcccagcactttgggaggccaaggcaggtggattgcttgagtccaggagttcaagaccatcctggccaacatagtgagattccatctctaccaaaagtcaaaaaaattggccagttgtagtgacatgcacgtgtagtcccagctacccgggaggctgaggtgagaggatcccttgagcctgggaggtggaggttgcagtgagccaaaatcgcactgctgcactccagcctgggcagcagagcatgacctcatctccaaaacaaaaacaaaaaactggggacggggcaggagttagcagagtcccagcaggtgaggctggtggagaggacagcttctgactaggacggggttgcctggggagctgtctagcagagcagaagagcatggatcttggcatttgaatcctgggtctcccacttcctaccctgccctgtgacactgggcaggttcctggacctctccatgtcatggtctccccgtctgtcaaataggaataatacagccaacctcagagttttcaggagatctaagagataatttctgtagagcacttaccatattatcttaataatagtaaaattatttattaataatcttaataaatattaataaactatcttaatagttcattcaacaaatactgagctcctaggtggtaaagataccgtagtgaccaaattcccttccctcatggtgtcgcgctcttagaggttcaacaggaatggatactgctgctgtcgttgtgtgtgacatatcccttagcctccttgttggtccgtcctctggccctatgtcttcatggctcttgcccctcttccttcttcactatctgactcaagatgctgtcatacccagctctaggcttctcctcttactcctgacccaggccttccagcctcacctgcctctcacccacctctctgtgtccagcctgcgtcacattccacattcactctaggggaggagggacctgttcctatccattgcagggcatttcctgtttacctcacttttcaggttttccaggcactttacaagtgtggccaacgatccttacaagccactttacagggtaggcaatgtttgcccatgtctgcagctttttgtttgtttgtttgagacagaatctccctctgtcgtctaggctggagtgcagtggtgcaatcttggctcactgtaacctctgcctcctgggttcaagtgattcttctgtctcagcctcccaattagctgggattacaggtacgcgccaccacgcctggctaatttttgtagttttagtagagacggggtttcaccatgttggccaggctggtctcgagctcctgacctcgtgatctgcccgcctccgcctcccaaagtgctgggattacaggcatgagccaccgcgcccggccagccatgtctgcaactttattctgtgagagagagaggataagtgcccttgctgggctcacacagtggcatcagagccaggatttgaccctgatctattccatgtcaaactggttctccggagtcttttaaaaattacccttaaataatggagaataggtggtaacgatatttgaaagcattgttcttagaccatggctcagtgcttggctcagcaaggcttccagctcccagttgtgcccatgtgggtggacatacctgtcatatcttcagaagatgggggaatgaattggacatcacagccctcctgggcagagaaattttaagcttccaaaaatgactcctcgacaagcttgtcaatcacaggaattgtctggacactgactttctaagaagtgggcaaaatgtcagtttttaagctatcctagagtctttagagtcttagacagctcaaggattctactggtcatctgggcagattctgtgttggccagacccaatggctaatacttcatagggccacagaaaagttaagatcaaggatgatgcctgagctctgagaacttgtctgggtgtcacaggacagaggatgttggacactgatagaatttcatgaaagccttttgaggttccaccaagtgcccacctaccctgcatactcaggcacacaaacagtccctgcacgttgaggctttgtcagtcgagtttaggttgtcttcgtctctcttaggaaagtggagagtacattggagtctccaggaattggggcaacatggaccgccctggcctctcttactttttatgttattcttctctccagaaggagaggttctttttccttgcatagtattctaaaagtcagaaccttggtcatgtgaaagggccggttttctctgtcaggccttcacctggtcaggcgttttgtacaggctaacaaaggctattgttacggggtcgcctgggagtcacctagaggatactgaagtaattcgcactaaaacagtttcaattttatgttaaacagattatattcctcttttttacaaatgtgaagtttaataggccagcttaattcagatttgcctgcatgcttcaattggcctaaagaaaagaataaaacagggtgatttcattgtcaccttctggcatagggtctgattctgttgagaagaatgtcccttatcctgttcgtgagacctgaaaatcgctctgattaatatgcgcggcacgaacagtgttagcggtgttgtcacatgatttcaccacttactttgtgcagggctttttttctcccccaaatcaatagacgtatttcttggttgtgcagttgagtctcctgacaggtttatttttagtctttcacagagacgctgtacaggtgagcagtatttctccacattccttccacagcattgttctcagcaacgttgaaagctggatttgctctaaattttggtgccgatgttccgcccttctgagaaaatgtggaagctgggaccatcctcatcccatgaatgcgtgtgtgccctagtttatccagaggctcaagtgctgtgtgaactttctgtggaaatgagttcatttctcccctcctgggctctgcttgtttcagggttggttgtcagttcagtaatggagagtgcctccgcatgttactgattgctcacgtggagttttttggtttttcttttttggcagagtttaaaaagtcagtgctagacactcatgtgcatgggttggaagacttattgtgaagataacagtactcccctaattgatctacacattcagtgcagtccccatcagaaatcccagctgcctttgtgcagaaattgacaagctgatcctgaagttcatgtggaaacgcaaaggacccagaatcgtcaaaacaatcctgaaaaagaagaacaaagttggaggattcacatttcctgatttctgaacttaccacaaagctgtaataatcaagacagtgtggtactggcataaggagagacatatagaccaatgaaatagagctgagagtccagaaataaatccttacatttagagatgatttatttttaacaagggtgccaaggcaatggagaaggagtagtcttttcaacaaattgtgctggggcagctggatagccacaagcaaagaaggaacttggtcccttacctcacaccataatcacaattaattcaaaatgagtcaaagagctaaatgagagctgagactataaacctcttggaagagatttataagtataaatcttcatgaccttggattaggcaatagtttcttagatagcacccttacagtacaagtgacaaatgaaacagtaggtaaatgggacttcattaaaattaaaaagttttgtgcttcagaatcttttttcaaactcagaaatccaagaggctgcctgtgccttgggatgcagtcgaaactctgactccagcccgtcttgtccacccctgggccttactgcctcagatgcagtatttgtctagcttccctgggtgctgaccacgtgaccgtgacctccctgtgtcttctgtgtactatccactttgccttgaagatcctaccctgattctgtgccagttcttgccttcatgtttaaaactcgctttttcctgtgcttttctccctttgactcttcagttcctgagtgctcttgttctcagcttccatcacactgattttcctgcgttagttctttcatcgtttggggatgtgcttcgttctccaaggatggtgagctgctcagtggcaatgatgagagtggccctagactctgaggatgttctgtggggaaagaagatggtgtaatggaaggagcctcagagtggaaggcaggattccattccactctctgctcttgctttaaggagctctgcacctggagcaaaccacttattttcattgtgtccctgtttctcccattatggaatgaactggataggcgttctcattaaacacctacgagcagccctcggccctttcctggttgacctgtgaacacttggttcacatcttgctcccctctcgtttcctttaagtctcagggaaatagaatttcctgcactggcactggtggcctcctactctcaactcagagtgtctgctactgtttgttttgtttggtttttgtttttttgagacaaggtctcgctctgtcactgaggttggagtgcagtggtgctatcatgactcactgcaacctcgatctcccaggctcaagcagtcctcctgcttcagcctcccgcatacctgggactaccagcgcctgccaccatacctagctaatttttgtattttttgtagaaacgaggtcttgctatgttgcctaagctggtcttgaactcctgggctcaagccatccgcccaccttggtctccccagatgttgggattacaggcataagccactgcgcccagcctgatatcatttgttaaacaccagttgagccacctgttggatgccagacactggacttgggccctgggtgttcattgctagtcctcgcttaccctaagaagctgataggctggaatttcccaactgtggtagattcaatcagattctcagctgaccatgtggatggtttacctatgattaagctcccttggtcagggtcagaccccccttactcaagattggtggagggaggaagtgaagatttttgcaatacttgttgatgttcacatgtgtgatcctattgagtccttactgtttattggccttactgggtattcttttcttattgcccaagaagggaactgaggctgagagcttatgtgatggttctgtagtaagggacagaaagctggttttgtcgttttgcttggaaacccctgcctttccactcactgcatcacctccctcctcgagggctactgtggccgtagtgggagcctcatgtcactgtcagggggttaaggctcgtaatgaaataaaacctggaaacttccagggctcattccttcagccagtttgggaatattggtttcctgacatttccttctccagcctgatagatggcatttatcagttcctagagcagaatctgatgtcccttttttgctgtgttgagaaagggaaatttctccaatttttgttgttgttaaaaaaaaaacacattaggcataagtttcctttgtgtactgcttttctaaaaattaggacctggacaagattaaaaacacactcttcaccattttttaggactcccaaattcgtcagagcacagcttatagcttacatcagcctcagggaaacaaggaacatgggaccgagcggaacggcagcctctacaagaagagtgacgggtacgtgagggggtgtggctagagtttaaatgtacgttcgttatcttgtgtccaaaatgtctaaactcttattgtttctcccacttatccacaaggatccgaaaagtgtggcagaaaaggaaatgttcagttaaaaatggttttctgaccatatcccatggtaccgtaagtattctcttttaatccatggtgtctgctgtattaggtgaggttggtgttggaggactttctgaagttagagggcaggagttgttctccgtgtgtgatggtattaaggatgtgtcttagagaatttccctgtcagaaacgcttgctggcctccgtcttgatttggtgcacctgcagcctgtttatgtttttttttttttaattttaattttaatttttattttttattttagccagatggagtcttgtccttgttatcttccactccctagcagagtcaggagtaactgataagccaggttgtctttatttagaagcctgtgactccagaaagcacagaacagcaaactgctcccccagctctctttgtctctggaaatcaaacatctcacttaggaagatttctacttttccattaagagaaaaaaatgggcaggactctggggaccagaaatccatgagaaaagacatctcagtgattttattattgaaatcttaacatatggtgcccaactttaaggcctctttccatcatcctgtttatcagagtctatgcaagaaaaaacggagccctctatgttgagcttatgaaaagccggtcaggataaagttccttaccaatctagctttcagaggccaggaacttggatcacagacacagccctgcacaccacactgttctttccatggcagcgttatacatactattgcctcacctggcatgactagagctggtgataaccacatgggctggtagacagctttggtaacatctcaaggccgaggtcgttgcctttttgttgctagagagatgctgagggttgtttgcattcccattccccaagcagaggcctagtagtgcatgcaagccagcagccttgggcgtgtgagtggatgatagtaaccgtctttcctgccccttgtccctccagtccctggtgaaggcagagctgggcaggagctcagaggggcttttctggcccctatagaaatgtcatcactcaacatggggtccagagaaacggccctgaggttcataagggaatagagtaaaaccccagccgaagcatgtcacagcagcaaggattgtgttcctctgggggtgcctttgtttttgccaacttcgatttagaaagggagagaggagctagaatagtatatacccagtggagggattctcggtgacctctggtctaggggtttgaatgtgtctctgaacttggaaatgaaggtcattttctattttcaaaacccagctttcactggtcatgtgatcaccaccgtactccccctgcccccgcgaccccagggccatgcagtatggatcttaatgggacattatgggcaggtgcagtggctcaagcctgtaatcctagcgcttagggaggccgaggcgggcagatcagctgaggtcaggttcgaggccagcctggccaacatggcaaaaatcctgtctttactaaaaatgcaaaaattagccaggcatggtggtgcatgcctgtatcccagcaacttgggaggagagaattgcttgaggcaggagaattgcttaaacgcaggaggcagagtttgtggtgagccgatatcacgccactgcactccagcctgggagacagagcaagactccatctcaaaaaaaaaaaaaaaagccattctttccatgcgtggatgtgagggtatgagttctgtagaccaagggaagcaaatttatccagctatcactgtctttaatattaggaatgttagattagatgagactaggcacccttctaaataccttccagatctcaacacctgtggttctgtggtttgctttcgaattggtgtccactcgctgtttgtttgaactccgattgactgcctcagtgcagaaactgtcatacaactaagttctagttcatgcttttacagctctgaagtcaaggggcatatttgcttcattgagagttcccctagatccaggcctcagcttaagccagtgagtggctctttccatggcagctggaaaacaggtctggtaatcctttgctgacagcataaacttcacttcgagtcacttccatagcttgagcttcctctcaaaagatgtggaggcttagttgtctttaaatttggatgggttgccccagtttttggcagatagtacggttataaccggcattactgggatgctgagaactcagcttgtcacacagcgtgtgcatatttaataggtgctttgtgtttggaggggaaaaccctctccagggaatctccacttccagaggtctcctcctgcctttagcagccatcgccgcctacatcctgcaggggtggtaggtggggctgtcttgattcacttcctcgctgccatgcagaaaaataaagtagttttccagccctccgttcagtggctgagtgttccttttctcaccttttccctatttccctgcgtgctctggaagtcagaatccagaggacccctctgtatgactgcgtctacagagaggttgcatgtggggaagtgagttcacccataccaagaaagagaattgagagatgcccttttggtttggtttggttttgacttgatttcttgtgcagctcacctgtttggccagcagctcctgagtgtgctcgtttacagtcaggaaaaaagggcacatttccaaagacttgattaagtggaagtctaagagcagagcctggcacatagctgcgaagcaggtctttaagaaatggaagcacacagggtgtatttacactggtaggaaaacccttcccaggaagctggcagcctctgggaaatgaagttgttgtattctgattggagcagaggattgaggataacatccgggagattcgttcaaagcccgagttgaatttccttcttagccaagtctgttttctggccctaggaagaagtgatccttgagacaaaataactctaattagatatcctctttgccagattcgcaggattgccacaccactgagggctggggactgtgttacactggaaggaatgtccactggctcttacacaatctaaaattttaaaaaatgatcagtcatgaagaaagaagaaaacaccttccttctaaaagcctgacaaatcgggaaaaaatagaacggcacgattagaatggagaatcactgataatctctgcctgcatggcaaactctaaagctgttgcatcttttttttaccattccttcccaagttttctactaaactagggcttctcaaattaaattctcaagaaaatactggtattttgtgaattagatgaaaccgttctgtatctcaattaactgatgacacttttttgtctgtttgtttgtttgtttgtttgtttttttctttttgagacggagtctcgctgtgttgcccaggctggatggctcactgtgacctctgcctcctgggttcaagcagttctcctgcctcagcctcccaagtagctgggactgcaggtgcatgccaccatgcccagctaatttttgtatttttagtagagactaaaaatctctactaaatcagccaggtcaggctgatctggaactcctgatctcaggtgatctacctgcctcagcctcccaaagtgctgggattacaggcgtgagctactgcgcccaggtgacactgtatttttccaaattgcaacagggaaggattttaatggatagaattttctcccataaatttttctaatagctttactgtttgctaatacttaatctatgtacttaatatttaacctgaatagcaaacagttattaatgtaaaacagaactgctggtgatattgcttaagatcaacttgtgtgttttgtggacccattcttatggttgtcattttttaatatgtaggcacatttatgtcttcataaattattcctacttcaaacaaaggtgctgaatatttttctctattttgtggtatgctgcgaagtgagaaatctatctttgatagtagttaagaacgaacacctttccccgtatcacagggaaaaaggaagactgcaaggtggaggtggggagggagaatgagttgtagtaatttaagttgtggttctttgctgctcttaaagataagtccaggcaagcaaccgccttccatggatacccacgtcgaggacagggagggtggcagttgagccccgagccctggagccagcctgacttgttggaatcctagcttccccgctccctagctgtataacctcaaccagattatttggtctgtccgggccagtgtctttagctacaaaattggtgtagttcctacctcaaagggcagttaggaaaattaaatgaattatttcatgaaaaatgtttagaacagtgcctgccttgtataggtatataataaaaatagctgagtaaatgtagctattgttattcaaagtcattattttgtccatgaaggtgcttctgtatttatcaaagcacacaaaccttagatataggagttattcctatatctaagaccccacaatttggaagtagccctaaaatttgcacgtgtacagttgtgtcatcacagggaggtaacagaatagacacaggctacgtatgggtgggtgtacacccgtgttaaagtacttggttgcatacatgttttgtaaccatgtttctagaaatagatcatttgctgtattggttcctggataagttaggtaatccgattggtaacaatccacgatcagtggtgctttcacttgaaagtgtccagatttacaagattaggcagagcttggtatcttctaatactgatttctgacgatccaggaattctctgagatatctacagattatggagaatatctgactaacctgtagaggaaaagaccaacacagccacgaaccaggagagtctagtacaaccctgtttatctgactttatctgactttcactagtccaaacttacatttattaacccaaatccttcacgctgcaaggatgggttcaactctcccaccctaactctgtagacttactggaaggaagctgctgggcctgtaagtgcttgagggtttcacaggtctgtccaggtgtagatgcatatgtgtatgtatctggattaatcccaaattcaggtttttttcatcttgaagtgaccggtggccaagggaagtggggcccaagaacgatggaagtttaagacattcttatttgatctttcctttagcagcttggtaggtgggtaagataagcccactcccatttggatattcctccaagatttctaagaggtattctgctgttcgaaatttttgtttctgaaattatcttcttaccctcagtcctttgctttcttggactaagtatgatcttttttttgaaactgtaataaaatagccatttttcatacacctctgatgaaagtatgttgtgatcgcttggtgtcgtgtgtgggggagagggtttgggggttacagatgtgaatgaagtatgttttgttgaaacttaagtgacagtgatggttggcatttaggaatgtgagtctgttatctgtcaccacttcaaacagtaggaaaataatttctctgccatttttgtactgtgaaattaccttcactggaagtgaggtttatgctaagaaaaaacgcttttaagatcaccagaaattgagctgggtgcccaagttacctggcaaatcaactgtgttgtcggtaggaatcagaactgaatgttttgggcttagccatgcaatatcttgatctgaaggcacccactgccagcagcctcaaagctggcatcgcttgtcctcttgtccaggtgggtttgtgtagaccaccaaggtgcccttgcagggaggcagttgccctctgtggagatgaagttcaaaggcctctgtaacttgtcccagtcaagccttcctctgtcaagtctgaaggccacctttgcaaactagtgaagagcttgctgttgctgtatctcgtgaggattgatactgtatgattttccattccttccacccaaccccaaccttttttgttgttttttgcttttaaacaggctaaccggcctcctgcaaagctcaacctgctaacctgccaggtgaagaccaaccctgaggagaagaagtgctttgacctcatttcacgtaaggctccctctgagatgccgcgccatagagacgttgtcttatgctctcctctggggcgtccttcacatttcaaacactgcattcggaagaattggtttttgaagagacataccctttttctagtgatatgcgtgctttgtgttccattagtaactgctggcttgccagcctttctagttgagagtttgactttgagggctggccctgctccttgggggcactgtagtcctgagacattacctggctctctgagcctcagcattcctgttcctaaatagggagatcctacaagagaagcccacaagcctaaaactccttcacttgaaaaagagagaaggaggacaattctgttttcaagaacttacataatttgggtgatgttagaaatgctaaaatgagggtcttcaacaggtcccttgaaacttcagtgtttgaaattgtttttcttcctcaccacaggaatagtctttctgcttctctgtgcttttcctttttgtggcgttcacaaaagaatccccacagaaccatccattgtggtgaatgtttactcagcaccccctaaattaaagggcccatgatgtctaaaagaaaataagataaaccttttttcctaggtagttctgtgtggcagggttagagtctaggggaagaaagggccagtctcccctttgaagaggcagtcactagggatttgggtgcaagagttacatttgcagaggaccacgccggactgtgtactgtaggaaggcggtgctgttctctgtgcctcagtacccctgagtgggagatggctaccttttcaaatgtcagttgacctgtattattgagggctaggaagtcacttgttatgtgattcagcgctcccagcaaactgcgggtaattatcactccacctcacccacaatggcttgctcttatcctccctgttccccttctcataccctctgtgtgaatctctggggagggttgagcactgtgatatgtgcagagggttccagtaccatttattctgttcttcagactctagactgatttgtaaaataaaatggactttatcctgtgtcaaacacccatcctgactcagtctagtaaggtccacagattctcatcaaagcttgcctttcattcatacaagatgttataaaatgctgagtactggccagagtttaaaatgtgattgcaagccaggtgtggtggtgtgatcctgtagtcccagctactcgggaggctgaggtaggaggatcacccaagctcaggagtagacgtccagccttggtaacatagcaagaccctaactctttaaaacacacacaaacacacacacacacacacacacacacacacacacaaacacacacaccactgctgggatacctgtgtctagctagcaaaaaaggcttgaattgaagagtttcagaaaacctgatggtgtaatctgatgtctgccagtggctggggctaactcagggttttaggcctttctgttttctgaactagtaacacacaagaagccatgcgttaaaatgcccatccttaactcataagcaataatagtgaacctatcacctggaggtgggtgtagggacttcttccctcaactgccctaggcccctccagcatgctccacagggagaccctgctagatgccatatgtgcagaagcacttgctccaatgtattcccagcctccacctttttacaacacagcaggcagcagggaggatcagtagacggcaagtgtgcatgcctcccttctgggtgtgagttactgcagcccttacacgtgtgggaatgcagtcctctgtgaatctggccacacacaagctctgtggccaactgatatttaccaagatcctgccagtgtctttgctgcagcctgatgcattgaaacatcttcaggaaggacttgtagcctgtgatgcccagacaggtttgctgagcccagttgggggcagtgtcgtgagtttgctagagtccattgtcatctttgaaaagagctctcatccctcctccttccctgcttgtcttccagtgggtaaaatgaattccagtcctgcaaattcttcatcctcagtgagttttcaaaaggtgccttcctatgagtatctgtagtgaaaatggtttgtgcaggggtatgtgggtttgggttgaaaactggccagataccccagagagtcatcacaggaaacctggctgcagtataagccgtgatttgatgaacatcctgagaaggtgagggacatggggtcaagacctgattctggctgattgaggagcatctgtcttcacccctctcagattcctcctctacttcctcaccagcctcatgggatgagtatcaccaagatgcttttgaactctcaagatgcttttgaactgcctgggtgggccaggcagtggctcatgcctgtaatgcaagcactttgggaggccaaggtgggaggattgcttgaggtcaggagttcgagaccagactgggcaacatagcaagacctacaaaaaatttaaaaatagtgcagtatggtgacatgtgcctttggtcccagctactcagggagctgagatgggaggatcgcttgagttcaggaggttgaggttgcagtgagttgtgttcgtgccattgcactccagcttggacaacacagcaagactgtctaaaaaaaaaaaaagacatttgggcagttggggaagtcaagtggaggcacatgcattgaggcagtgagggtgatattttctgtgtgcatctgccaggcactccatggtcacccattcctcctcttcctcatctggtcagttcatcttggaatctgcccagagaactcagaagagcaatagactggctggctggttgcagttacttcctacaagatgttcctttaccatccttgctcctaaacaggggcttcccattctcatgaaggtggaattggggccaggggcagtggctcacacctatagtccaagctacttgggaggctgaggtggggggatcacttgagtccaggagtttgaggctgcagtgagctgtgattgtgccactgcactgtagcctgggtaatagagggagaccttgtctctttaaaaaaagaaaaagatgtaaatgagcatgggcttttctaggaggatggttctgtggcaaggccggcccttctgggagctcatctaatccattgcctgcagaccgaccccactcatagcaaattcaagtcctgagccattatccgcgaaccccataggcaccctgggagggatggaaggaacagtagaattgtgaggtgacccaagtgagtcccctgagtaggatggagccagagggagtcaatgaccttccaggtccacatggcaggttagcggccagtagagccagagccctggccacaagctgcccttcactggccaccagcacctgagtgctccgatcgccccctctgtctcctcctgctcttctccctcacggctgaagctctggaagccgtccgcttatttgtagcatctttaaagagagtgtagtggaggggattcttgcttgaagtttttcctcagaggtttgcctcctgcttgtgcagtttttacacgtcagaatgcagaaattggccaggtgcggtggcccacgcctgtcatctcagtactttgggaggctgaggtgggaagatcgcttgagcctgggagattgaggctgcagcgagctgtgcactgcacgtttgcaccactccactccaacctgggcagcagagtgagactccgtctcaaaaaaaaaaaaaaaagaaaaagaaaaagatgccatggtgttgtagaaagtggtcgggccagaagtccaggaaccaagttctgctgctggctatgcttgttttttgcagcttagcctctctaggcttcagccctcacccagtcacttaccaagagttgttctaagaaccaacgtgctttcaggagtaaacaccactacagagaggtggcgtgtccactcacttttaggagcacagatgttcgttgtgtttccctaagaagagaattggtacttgtcatcattctgccatctgcaaaagctggattcccctgcccctgcttttctttattaaatataattttattttttgctttggttttagactgcttttagacagagaatatccatatatccctcccctagctttcccttctgttaacatcttaatacagttatccagtagtccgtggtacatgttatccaatcatatttatgtagttatcaaaaccaggaaacattggtttgatgctattaactaaaaatcttactcagattttaccagttttcccccaaatgtccttttttctgttccagaattctatccagaaccccatgttacatttagttgtgattttatcctggtctcttgcagtctgtatcggttctgtagtctcacttgtttttcatgatgccttcttaaagagtattgacctgttttttggtcagactccccttaatttggatttctctagtgttttctcatgagtggattgaggttatatgtttttggcaagagcagcacagaatgatgctgccacatcccacacagccgcctccctgctgcacacacacacaggtccacagcctggcaaaacacttgtaaaactgtgctgacaccagcagtatgtaagtgtaggattttatattcgaccattatttaacacactcctcttgatttagctacatttctagtatttgattctcaaagcatattattcttagaatttctcatactaatctttttctgagaaagccagaaaacttctaagatattctttttaaaaaaggtttttattattcaaagggcttgaacaattactttttgggggccaactctgtagtgagttaaaatgaagctattgagaggatagtgatggttttcattgaatagcttcagtttttagaagcggcgtcttttaaaacttgaatgagggaaagggcaggtttattttgcattagaatgccaccgttggtgaaggcagacatttggaggatatgagggagtgcctgattttatacaaatcagtaatttcgtaacagagagctaagattattccagaggctaattagaaactattttcttttggaattgtgtatggattgctgtctgggctcacagttgaaattcctcttgctatgcagatgacagaacttaccactttcaagctgaagatgaacaggaatgtcaaatgtaagttacatggtggtgggactttgggctggactcagccgttgtttgtggaatttaacacagcgttgctcttgtttttctagatggatgtctgtgctgcaaaatagcaaagaagaagctttaaacaatgcatttaagggggatgacaatactggagaaaataacatcgtccaagaactgacaaaggagatcatctcagaagtgcagaggatgacgggcaatgacgtctgctgtgactgtggggcgccaggtgacccagggaccccacccgaccctgggctctaggacatttcaatcccattctgattcacagaatccgttcattgattttcactttcatttcaaacacgaaattaagtgcagctcagcctgagttcatcccattacacaaatgcttaatgaactgtgcagaccgcggcaggggagaggggcgggaagatgtttgcctgccgggccccagagcaggactgagtaaagagggtttgacagagctgcaaagtttgaaatgctttttgagaaatgaaaactgaagggtacagtgagagtgaactcaaggtcatgtgggctgagaggctgcatgtggatgggcttccttgcttggaatctgctctcttctccctttatcctactttgcagaacttctgaagtagctttaagccgctgtctggctctgtgaccctgggagagccacttgctttgttaaacatcgattttcctgtctgtaaagtgaagggacaggaccctttcagctgacacattctgtgaaataagattttatttttacattttgataaagcatattaggggctttatagtaggatgtgatttaaggaatttgcttattctaattgagacacaatggtggggagtgggggtcggggactacacaggtgcattttctgaacatttataaaatgaaaaagatggaggcttggctagaatggttaatccccttttcattcctctaattctatgacaatttttcttaaaaaaccaaacacaaccaaaataagagtggacagttgagaattacctttaggttcccatgaccctgaagactgtatttggccttggatccattaaaaaaaaaaaaagaataccgactgggtgcagtgactcatgcctgtaatcccggcactttggaagactgaggcgggcggatcacttgaggtcaggagttcaagaccagcctggccaacatggtgaaaactcgtctctattaaaaataccataattagcccggcgtggtagtgcgcacatgtagtcccagctacataggaggctgaggcaggagaatcactcgaatccaggtggcagaggttgcagtgagctgagatcacgccactgcactccagcctgggcaacagaacgagactgtatttaaaacaaacaaacaaaaaacccgaaaatacgtttttggcaggagatgaggtagggggtgataagtagtgaatcatggtctttcttgagaaagggtaaagacagtctatgatttgggtgtttcatacgctttgataaagaactcaaaggtatgtactcattattttaaaatgccaagacagtgtgggtaatataaaaatgatgtagagtcacctaaatggatgcttgtacctccgcaaagcacaaatacagtggagtcgtcctacacaagtgcagacacagacgccaagaaggttttccaacatggataacatttttaataacttgaacatttaaaaaataacttcatgatttcctactgactaaagttgcgatatttacctgccgtgagtttctcagggcaacaaacagttctgaagagaattgtatttatgggttgtgatgatgtactcaaggacatcttatttttaatttcccatttttagcaaattccacattcatctgtcaagcattttgtgggtccctatcatctgctaaatgtatggtaggtcatgttagtgagtagccgagctgtgaggggaaaacgtggctttgaactcaggtagaggcagggccacagtctgctctgcactccctggcgacctcgagcctgagcatcgcaaagctgtctctgccatatagtgagataaaaatccctgccctggtcatctcatggaactcttagatttgatacaaaagtgctctgtgattgctgaagctcttaacaacacaaactgttattgctactaccagcatgctgaacacagcatatcttatgtacatagtacgttctctgttattatcagcatctgtagatgcatatgttttaagcctattccccttttacaagtagactttggctggtctcattgttttcctcttgctccattctgctagtgtgaccaagttggtgatgggcatggtgtgttttcaccaccagccattgaggagcccttggtcactggagtgtgtcctgtttatttttgcacacacagcacctgtcacatgaatggaaggatggggagatggagagagagggaagaagagggagagtagatgtgtgcatatttgggtattgcatgtaaattggtggtaattatggacaaagtttccagctgtgttaaggatcagaaaatgctcatgctcagaactgcttgttcagtaactatgcaggaagaaagatgtgactcctgaccctcttttttactggaagctcaaatctgccctgttctctttggcagatcctacatggctttccaccaacctgggcatcctgacctgcatcgagtgttccggaatccaccgagagctgggggttcattattccaggatgcagtccctgaccttagatgtactgggaacatctgagctgctggtaatttttaaatccttgatttcagattggaaacaaatgagctgtaagctaaattttacttttggcattctaatccattttggtaagctagtggttgttgatatgttgccagattggtttggataattagaaactcattgataattcttcatttttagctacttgtggttgagggcacttcttgttgcaaaactttattcttaaatgaataaaggggagtgaaaccaaaacaggagcattgagagtggtgtgagattctacagaaatggagtaagatggtgacatagaccagctcaccccatccattagacagatgtggaatgcaacgtctaaagacaggaaagtacttgttttcccttatcaccagcgatttctgacaaggctgtggtgacaacttgcctcaagcctccgacttctccctaccccagattgtcccccatggggggagatattggtcttcatttttactgcctttgtttcttaagtctttcattcttggttcagtggtaacacttaagccatgtgatagagataggaggagacagaagcattttctgtgaagtggctttcaagagtatcgagactgtagtcccacaaggtccatcagacagggtgcttctggccacctaatacatgagctttcatgactgtcttccctagaaagcagttcttgaattctctcctgggatagctggatgttgacagtaaacagtaagtagatagtgattggcattgattttaatgttgaatttaaaagtttacatgtagggaatttaacgtcaagagcaatagtcttgacagaaaatcaatagttgtggaccatgttcctctcaaggggccatcagtcttattgatgacttcgaatccagtgtgtctgaacttcgaatgcattttgaactctcttgtcaaacctttccagtctttctaggaattcctttatggtcttgaaagacagagttgggagaaactacagtggatcctggcagcctagttagtaacatccttagttacttacagtttaaaactaagctagactcacttaaaatgtaaaactaaggaactccaaacagtgccttcctggttacatacagcaattattgttcatgtaataatgcacgtaacctacagcttagagaggtgcacaggtgtacatgtggtatctcttggataactgatgatggcatagattggaggttgtcatggtacattttcaaagaagcacaaagtacttttcagtaaacactggtgaactatggcagttgtttcttttactgattttcttaaaacaatggaaagtgttaagtgattcaagatgatgtaataattgtttattttgtactatgtattttgcaggccactttatatatactaggctcatttgatctccagtaacaacctgatgaccttggtatattatccccattttacagaggaggaaactgaggcttagaatgtttcagtatgcctagggttatgaagcttttaaggtgacagatctggggtgtgggcctctttaatctgataccagacctcacacttaaacctttgacgagcctgggacacaaattggcattttagtgggttgtcttgctagatgataaacatttaaacatctctactgtccttccctatcaccgtccccaacaaatgtttaacagtcaactctggagaaaaaagaaccctggtttgcaacctgcctgttctcatggtgtaaatactcccacaatggccaatttcaagctacctaagtgaattactcaatgtgaagttggaaaaagatgttcattatatagtacattcactatgcaaacacagtggatgtaaataacttcatgaacatggacaatagtaaaatgcagtataattaggaagtgatgagttttgagtatatacttgttattaatgtaacataattatgagtttatatagcataatttttaatagtagcagtgcttaacagttggcttgcaaaattcctgaaattttaacagttgactcatatgagctggtaggagcccgaccccaccatctgttataattttttaaatgtgtctcagaaatttcatgttcttcatgagactgagttgcctactaaagaagaaaatgccaaagaaaggtgaaaggaatatgttgttctgtcttgatgaaacgatgaggtgacttctaatgcctggttaaattctccatttctgtctcccagagcctccatctgcattcttgtaggagtttaaagtttggttggctgtcacccacaatgagaaatcagccagtgcctgcttaatcaatgtctgcagatattttcaaaatctaattgcttccagagttttaaactctcccttacccaagtcttttttcctcagtggttatcaggaaaagtagagacagcagtgaattgtgtaggatttactcccttcaaccctgctttccctgagctctggctggtcctctgtggttcacaggaggtggacatctccccacggctcccccaatccattttttgtatgctaggagtgtggtcatggtgtcgtggctctaaaccttattccttagcccttcagttaagcagtacgtagggtgtcaggtgttagtattcattggcaaagcttggaaatttcaaggcttctttctttcttttcttttcttttttctttctttctttccttcctttcttttcttttccttttccttttctttttttgacagggtctcactccatgacccaggctggagtccagtagcacaatcttagctcactgcaacctctgcctcctgggttcaagcaatcctcccacctcagcctcctcagtagctgagactacaggcaagtgctaccacgcctggctaagttttgcatttttggtagagatggtctttcgccatgtccaggctggtctcgaactcctggacccaagtgatcctcctgctttggcctcccaaaatgctgggattacaggtgtgagccactgcgcttggcctcaagccttttaaaagtatccagattgttttattttgcttagacaatcaggtactgggatgaaggatttcctgaagtctttttacctctttatcttatctctttctctgcgtgtgtgtgtgtgtgtgtgtgtgtgtgtgtgtgtgtgtatttagaattatgtctgacacaccgttaagaaccataaagtattagttatcattgttatctcctttaacaaaatcctttcagaaaaatggtccccatgtgctagcatgtgaacccccagggaggccatgcatggtctgtctggttgtctgttcttacgaacctttccaattcagagttgcatgccatgcagggcctcggctgacttgcttattgaagtatgttttattgtatagtgagtgttcattaggccccttggtgccttgtgaaaggagagtggtgggtgcagcctggacaggttctctcacaggagtagcatctctcctcttttgggtaaatagaacagcctctgtttcagggtgacatgctgtgacagcaaaggattttatttttttaattaattttttattgcatgtatttatagtgtacaacatgatgttttagtatgttgtatacattgggtgtgactaaatcaagctagttaacatatctgtcacctcacatgcttatgttttgtggtgagaacacttaaaatctactctcttgagcctggtgtggtggccggcgcctgtaatcccagtactttgggaggctgaggtgagaagattgtttgagtctgggagttcaagaccagcctgaccaacatagggagacctccatctctacaaataattttttaaaactagctgggagtggtggcaagtacctgtggtcccagctacttgggaggctgaggcaggaggatcacctgagcacccaggaagttgaggctacagtgaactgtgatcttgccactgcactccagcctgggcaacagagtgagactgtctcaaaacaaaatttttaagtatacagtacgttattattaagtagagtcactgtgttgtacactagatccctagactttattcatcctaactgaaattttgcatgctttgaccaacatgcccacccccaacccctggtaaccatagttctgctctctacttctatgagttcagcttttttagattttgcatataaatgagatcttgcaggatttgtctttctttgcctggcttatttcacttagtataatgtccttcaggttcatccatgttgtcacaaatgacagaatgtcctttttttcaggtcgaatagtattccattatgtatatataccacatttttaaaatccattcgtccattggtggcatttaggttgattccctatctcgactattgtgaatagtgctgcagtaaacaagatggtgaagacgtgtcttcaacaaactgatttcagatcttttgggtaaatacccagaagtgggttatatggtggttctagtttttcgaggaacctccataaccattttctataatggttgtattataataatttacattcccacccagtgtgcaagccttcccttttctccacatccctgccaacacttgctatcttttgtctttttgataaaagccattctaacaggtgtgagatgatcgtggttttaatttgcatttccctgatgatttgtatgattaatgctgtgtactttttcatacatatacctgttggtcatttgtaggtcttctctttctcttttttttgacaggttcttgctctgtcgcccaggctggagtgcagtggtgccatctcggttcagtgcagcctctacctcccaggctcatgcaatccttctgggtagctgggactataggcatgtgccaccatgcccagctaattttttaaaatttttccatagagacagggtctcactatattggccaggctaatctggaattcctgggcttaagtggtcttccagcctcggcttcccaaagtgctgggattataggcatgaaccgcctgcagcctagcattacttcttttccaatggaatggaagttgcataattgaattattaattagttctggggaatcatgtcatcttaactactttagcacacaccagcttaatatctttagattctaaagcaaacctactttgggaaaaactttctggtaaacacagattttaaaaagataaatttccttcttaatgtagaagatcatgatttcagctttgatttttcaggtcatatgaaaaacagtatcactggtactagggtactactatcatgatcaatttcactatcatacatgaagttaataaaggaattcttgatattctgaaattgaatttgagtcagtcatttaaaaatcttatgagaccaggcgcagtggttcacacctatagctccagcactttgggaggctgaggcaggcagatcacttgagcccatgagttcaagaccaacctgggccacatggcaaaaccccatctctacaaaaaaaaaaaagttagctgagtatggtagtacatgcctgtggtcctagctatcagggaggctgaggtgggagaatcacctgagcccaggaggttggctatagtgaactgagattgtgccactgctctccagcctgggtgacagagtaagaccctgtctcaaaacaaaaaaacatcaaattaaaaaacaggcatcaagagcattaccaaatatttactgactcagctttctgtttcttgactttcttctatttctgttctcatacggttgttaataagctgtcaaatgttaaagcgggtcaacacacagtctgatctgaaagagagcatgtggagaggaaagctcctcaaagacgaagaacttaacgacttacaactgtcttctaagttcacctaggactgaaatgtgccacccagatactaaaagcaattgcttagggcaacaggaaattgactatcagtggtcatttacggaggaactgttatgctccaggcattgttgtaggtgttctacgtacactgtattatctaacctaaatggagagctccatttttaaaaaaagaccagagaggttaagaaacttacccagtgcaggatttacattccaactatcagactccagagcctgtgttttagcctttttttttaaagccaagattctgaacattttttaaaccacaaagtctatcagaaaaaattgagcaccaaagcatgtacttacttacatatgatgtacctacacttactaagaaatacatactttgtaaactacatcaaaaatagagcttttaaagggtcaggtaaagacatcatatgtaaactttttccctgcacaccagagtgtccttttgtgctctttgctttggaggcagcagtttggtcaagccccttcccttgtctgggcctttaccctctgtactttagagctggactgcactcttcaggccctccacccttcggggatccaaggggcccagttaacatcagggaggagctgaccttggggtctcctgagctcagcggtcagggaagtctggtttctctcacttgcctgttctctcctggggtgagtcagagaagaatgtcacagcaattgttgtccttcctcatggagacatgaaaacaggacaggaggtttccctgccccaccccaaactctcaaaacaatgtccagataaaacctaaagcttcattttggctcagtgggccctgctcaggtaggtgctaaggacgtacaggtgtgtgattctgtgtctctgtcctgggtgtggccatcagggagggagatgcccacacacagacgactcccccgtatggtgagtgccaagaaaaggggcctcctggccaagggactgctctgctcatctgggcctggtgccgctgtcctcatagtgttcaggatgaacttcttttccagggcttcttattgactcatcgctaccttgttgaagtgagctgccatagagcaggagggtgcctcatgcctcatgcccagcacagacgaggggctcagagtgtgctcctgaggccacaggaagggcgacggactgggctgagctaccctgggtgatacagaacttaaacactccctcctctcctccatccagtctggctcaatttctgcctcagtgcagcccacaaattccttctgggtgccagtgagaagcaggagatgccagggctcaggtcgacagccaccttcctgcccccttggtttctgcctgcctgtcctgctggcacctgcagcctccatttgcaaatgctttgcttttgtcgatgggtctggaggggttctctatgggctgaaacgtaaactggaacttggcagaactgcaaggtagcacgtttctctagcattggatgagtgtgacacatggatgcggtggctccctggaccagctgtctctcagttaaccagccaagtccaagcagaagggaagcagctcttcgattcctggggaattctcctcctcccatctccccacccccatctgcttaacacaaactaggaggcatcagggtggttggcccctggctcatagagggggccacagtgatttttgtcactcaacttgggaaaaccattgtgctcacctggggacagtgtcctgcttggattgtatgctgcctggctataaaccaggcgctctgacattggggttcagtcctggatctgacaccagctgcctgagaaacccttcacagggcattagcttcctggtgcataggtacctgtcaccttaagtggtgtgccacctgaccattctgttgtccctgggaaaattgcaacgcagcctctaggcttttgcctcctgactgatggcttgaggtcccagagccaggactgagcaaggaggtggagttggttaatgttttatgctttgggccgcctagaaaaagctttttccacgtgtcaagggccgggttgaattaggaaagctcatcatccagctattaggctaccccacataattcttctgtttttaaaaaattgcgtctgcatcctccactagcccactagcccatttcaccgtttgatgttatttgccgccaggaagttccagtgtatctaacccagacctcttgggctctccttcagtcagttccctacaagagatagacccgatttcaggctgcagcagcctctcccaaagcatgtttgttaactcctttgcctgcataattttttttttttttttttgtagagatggagtctcactctgtcgcccaggctggagtccagtggtgtgatctcggctcactgcaatcttcacctcctggattcaagcaattctcctgtctcagcctcctgagtagctgggactacaggtgcacgccgccatgcctggctaatttcttttgtattttagtagagatggggtttcaccttgttgcccaggctagtctcgaactcctgagctcagccgatccacccgcctcggcctcccaaagtggtaggaatacaggtgtgagccaccatgcctggcctgcctgcataatcaatagagagcagaaatatcacaagcgtcactgactccccagcagaacatggaaatgaaaatatgttttctcaaagcactgagcttggtgctcccttttggtattatttcattaaacgtttaagaatctgacctggccaggcgcagcggctcacgcctgtaatcccagcactttgggaggctgaggtggccggattgcatgagcccaggagttcgagaccagcctgggcaacatggtgaaaccccatctctacaaacaatacaaaaatcagctgggcgtggtggcgtgtgcctatagtccccgctgcttgggaacctgaggtaggagggtcacctgagcctggggagggcaaggttgcattaagccatgatcatgccactgcacttcggcctgggcaacagagcaagacactgtctcaaaaaaaagaatgtgttaatttaatgtttaacatgtcagaagattgattggcaagtaaagaccttacatctggagctaatatattacatttttagtgtttcagtttactgttttcacctaaattttatcaacccagaagtataggtatcatcccattttactgatgaaaactctgccgctcagggaaactgacttgcctgtggtcacacagccggtaatggagctgtgatttgaacctgagtcttagctttcctggctcagtgccgcttcactctaccagaactacctcatagctggcataagtaaaggttgtttgaggatgtgaaatagattcactttggttgaggcacaggtcattgggaggagtgggtaaggatggaaattcacattggaccaagttactggttctccctgtctctgtctgtactctatccagagcgcgttttatgacaatgcgtctctgtaataggcatgccgcttcttatctttaattttatgggtacctttgggctttgggttttgtccatcttcattaaaggcaaaccactttattgctctatttcttagtggccattaaataaatcatcagatggggatgggtaatgtgtagcagtagaatgtattaataattgagtatcctgaaatagactttcatttttgcagctcgccaagaatattgggaatgcaggctttaatgagatcatggaatgttgcctaccagctgaggactcagtcaaacccaacccaggcagcgacatgtaagtatgggactggctattctcatttgctgagtaaaggtttgcctttgcccgagccccgggaggcaggggaataagaagttttgggtgcatccatcgttgcttctttagggaataaatcagcctatgttgggttttcttagtcactttaaccttttgggtgaccaaatagaaatttttttaggaagaagccaaaagcaggcaggtttcgcagatgctgtgcgtgtgtgcagcgggtatgtagagagcctcactcgccactggtgggtggaagaccctggacttttcacctgtgctgtctgttctgttgagtcacttccccgtcttggtctctctgcataatcctgagccaccgagatggctggttgtggtagatatgtgattatgtagcgtccttcttgccaacgtccttgcctccttgcaaatgtggaatgtgttacttccttcaaaaaatgtttgtgtttgtgttattgttgatacacaacttgacggagaagcttttttttttttttctgggagacggagtttcactcttgttacccaggctggagtgcagtggcacgatctcggctcactgcaacctctgcctcccaggttcaagcgattcttctgcctcagcctcccaagtagctgggattataggcacatgccaccacgcctggctaatttttatatttttagtagagacagagtttcaccatgttggccaggctggactcgaactcctgacctcaggtgatccactcgctgcagcctcccaaagtgctgggattacaggcgtgaggcaccgtgcctggccagcggagaagcttttgtgtctactggtgcagagctgacaacagggaatgttcttgcccatcttatcagagtgtcagtggccatgtcacactagtcttcgagaagaggtggacagggagacccatgggttcgggcagtgggtgtccggctcgccttagacttcagctctgtttagtattatggctcttatgtctatagggggacatgggtggtttacctgttttgttgtgatgcaaagtgaaacagacggaaggaaggagagaggctactgggccagttaacagagcacctgcatttgagtggtgaggctgggtcagcgtgtcctggcaggacagagaaaaatgaaaaatatgtgataagaaaaagtatttaaaaattcatttacagaaacagcattttctgtggaataagcctgaagtagaattaatgacacgagtcttcccaaaggacagtgagcaacagtgaacaatgtctttaagggtggtttcacaaataggtggtagtgtatggaccctttgtaaagggagagaatttagatttttttttccccttcaagacctcttgcccaggctggagtgcaatgatgtgatctcggctcactgcagcatccgcctcctgggttcgagtgattctcctgcctcagcctcctgagtagctgggacaggcacatgccaccacacccagctaattttttgtatctttagtagagatggggtttcaccatgttggtcaggctggtcttgaactcctgacctcgtgatctgcccaccttggcctcccaaagtgctgggattacagacatgagccactgtacctggcctagattttttttaaccattttgtgtggcatgtctttgagaaacggagattgcaggacctgtattctttctgcgttttgctgatgtaacttgatacagtgaaagagccagaacattgcgagggagtgaacagggaccatgtgcattacagtctttcaggtatcaggtatctcaggtgagcgatttagttgttgttggattaaagtcagtttatgtttgaatcctgtaacaagtgtttgtggtgtcgcatttccttgagaattggataacgtgtggttttacataccaggcatgaggttgacaatgtgatcatcctctcttgatgaggatctaagtttcaaatctatatttttacccaaacctagagaggcagtagggacatagatatctcagtccttatctgagccatgggacaccggcagattgtttaacttctctgagcctaagctctgtaataaaaaaagggagataacgttccccctcacagaggcattgggggcatgagcgggatgatggggtcagacatgtggtgcttagttttagtgcctggttgacattagctgccctgcttgctcttcttcctgtgggtgacagaagtcacatctgtaccctgcattgattccatacaccctgaaaatgaggttcctctccagttaagtttcagtggagagttactcaaggtgaaggagctcttcctgggcgagcctgagggtcccgcttggtgaaggaaacgtcgtgaatccagcatggcgaggtcatctcctgctgtgcagttgacacctgctctttcagctgcttcatctcacactgacggtaccagcaccctgtaatgctgtcatatcggtcagttctgaacaaagtgtgtgtcgtttcttccaagcaccaggggtacctaacgaaagcagggcatttggttgttctggggctaggcgattctaaaaaatgaacactgtcaatgtggaacccttcagtatgaacgttctgtctgcactgtagccctcctccagccttggcactgttgaaaaagaaatttacatcccccaaccccgggcttttttcaaaatgagggcggatgacccgtgtgatggcgaaacatcagctacttccattccttctcaactgaaattactttcttggctctgtgctcctatagcatttggctctattttaaaacatttcatcccacttcatagtatactcaggcatttacatatatttttctgatgaattacttcttactcattttggtttttcccaccgtaatatgttgcttctggtgaaccagtgactatttaatgaatcagcgagtcaaacaagtactcccagctctgtgcctgcttaaataagctagtattttacttccagatgaaaaggaatacactgcttctagctttatttcagaacagcacaccatctgcagataaatctgttgaaggggaaaccaaggacaccctctagtggcctgtgaatcccaagacggatcttgggggtgtcagggacgtgtaactgggggaggtggagcagggaagctaggcttgtatttgctcacaggagccagaactgtttctccctgtgacttgggaccattatacacaccctgtccttgagaagtgtaaggagagcccctcctctgaacaccaaatgtatcattatgttaattgtttttctgcaaaagcctgtcattaaaaaaaagagggagggccgggcgcggtggctcacgcctgtaatcccagcactttgggaggccgaggtgggcggatcacgaggtcaggagatcgagaccatcctggctaacacggtgaaaccccatctgagggatcacattagcaaagcaaacctccttcacaaaaccagggggcatgtgtggagttaaacagacctgtgcccatgtttgtgtaggagctgccttcggggcctccaagccctgggcagatgagtaaatacattaaaaaacaagtaaaggaagtccactttctctctatccctttcctgtggaggtcgcagtaatgattgtcccacagtgatgattgaaagtgcatgaaactggacaactgtccagtctaactgcctgtcagaagaggcatttacatcattaaatgggctgcccaccatgacactcgccaggccaggaatggagcatctccctgggtgtcacactgtgctggaggccctaagaggagaacctgcaggaataaaatgggtcttcccttgtaggcccaccagctgcctgaggaaacagaatccagtttccctttatggacttcagtgtacagtaaatcctgaatgttccagaaactcaaaggtttctggaaacctgtgactttaagcaaaatgatgtataagaaaccagttttaccctatgccaattgatgtaaaccagagttcagttcctaccatgtatttctgatcatgagaacatcaccaaacttttgaataaaggcccagaacacttctaatattaaacattgaaatatgagcgatgcatacatttaagaaagattctggctactaagtgggataaagaaagatcataaaaaccagtaagataatgattcacccacttattccagttcagggtcagaggtggctggagcatgtcctggcagctgaagtccagggtgggaacaagccctgaacaggaccccgtcccactgtgggacgcagtcacacccacgtccacactcagtcgcagtggggcctttgagacacagcagttagccgaacgtgcacagctttgggatgtgggggaaaccggagtgcccagagaaaacccaggtggactccacacagacagggaccctgcctgggaattgatttttttcttaacattataacaaaatgctgttattcgagggcctgttgtgcctacaggtggagatgaaaactcatggcactgttgagggaacccactgagaccacgtatctcacacacaagtcagccagcaccgcagtgagctcagtgcacgggttagcgctgtgtggacggggagcatgtgccgggggacgttgaggcacccgccttaacctaggccctgtagagcgggcagaactggagccggagcaggagggaggcagtgtgataaaagtgccagagcacaagttcaccaggtgcccctggaagtccttcctgggctgtgaagcatgctgcctgctcaggtggaacgggcaccctggggcgtgatttcctctccagctgcaccagccagcctcacgctgcggcgtgtccaggagccacatgcacccaaggacaagcagatttgaggcctggcagacgctggcaagagacctctgcccactcagttccgtctgggtgctgtgggagtaatggcttctcatcttaggctggcccatcttcaagggaccccagggtagacaggatctctactccctgcctccagtggcatgtccagggagctcaggctccccttctggggggccagttgttccacggggatttagggcaggtacagaaaagtcaacaactgctccagcagccatggccccttgccatagtcagctgagtgagagagcggaggtcaggagggaaccgtgcggggactccagctcgaaggggagcagccgcatttgtcctcagattgtaggcagtgctgtgttacaaatggatgcaactgatctgcccctgcctggctcttgcctgattctcaagattcaaagagtccctgggcagtgaccctcaaccttcagaattgggattgtaaaatgcatgtactctgtgaccagtgagctgctgtttcgctctccctcttgtaagttcactgggtctttccaaggcccgggacccactgtgtgtgctgcaggtgtgttgacgcacatacgtctcatggtgctactgtgaggatgtattgtgtgcattttcgcaagtcagacttacaagtctagagagatgaaatacttattcaagttcaaagcagcagtgtgtggtgggagtgggatttgaactcaggcttctttggcccccttttgttcctgcttctgtaggctctttggatggggcggagtctgagcatgttgccacataaaggccagaaagtagaacacaaagaggactgccatttcatttcagttcatctgatagtgcctttcataccaggcatggtgcctacaaaaaagaggtcatagtccatgccccaaggagctcatgggcctgtcgggcagtgaggcaggcaggccttcatgtagagaatgttggaacagaggttggccagggctgcatggagggcaggggcagggccttcctgggggaggaggcgcagggcatgcggattggaaggacctgaataagaagggtgtggaggtgacgagggcgacagtgaggtcagatcacagaacttaggagtgaggggagggagacaaggcagagaggcgggtgggctgagagaacatggggagttgtccccctggccagttcccaggaggtcgcagtgaagaccagtgcagccgtagaaccacatggcggccactcccgctttgtgtttcggggccagcggtgcttaccagggacatggcgcaggaaccgttaacatggccttagacaaagggaggccggacggcgggtagaagcccttcatgatttgcaaggcaattacgtttggtttcaggaatgcaagaaaggactacatcacagccaagtacatcgagaggagatacgcaaggaagaagcacgcggataacgcggcgaagcttcacagtctttgcgaggccgtcaaaacgagagatatttttggattgctccaagcttatgctgatggtgtggatcttacggaaaaaatcccactggccaacggacatgtaagagtgtgggttgttgctactttaaaaaaaaaaaaaaggccggccacggtggctcatgcctgggatccagtactttacttcaggaggccaaggcggaggatcctttgagctcaggagtttgagatcagcctgggcaccatagggaggccccatctctacaaaaaaaaaaaaaaaaaaaagtaaaattggccaggcatggtggtgtacatttgtagtcccagctactcaggaggctggggtgagaggaatcggttgagcccagaaatttgaaactccagtgagccgtgattgtgccactggactccagcctggccgacagagtgagaccttgtctcaaaaaaaaaggaaaactggggcactgtggcaggtctgtggaatcagcagtactgaccaaagctgggtaattctccagaggaagacggcacggagaggggtactggggtagaataaactagggttttttcttttcagtaggaaaataattgtatctatgttcatggggtatgctgtgatgtttttgatctatgtttacatcatggaatgattacatcaagctagctaacatatccattacctcacaggctcatccatttttaatggagagcacatttaaaatcgactcagttttgaaatagacgctatgtagtcttacctggagtcaccaggctttgtagtagatctgcaggatttattctccttgtctaaaactttgtacccacctagtggtttattcttacaccaaaaatgtaatgccagctctggaaagaaaacccatctccaggtggaggagaagacatctcagaagctaggcagcctgagagggacccctcatctgcaagcaggtttaacctgagcttcatgctaacgagagaagctctctgagaggggcggttccctggaacccacaccccactgtgctccccctcagagggaatagagtaggagcaagacccctcctttcctgggggagctgtcttgagagggtgggcatccagctggagtgggtttgcagtaacataccagcacccaagtggggtggcatgtgtccagattctggtccacaaataccctgtagatgcacatttggtcccctggaacctcctgacctcaggactgggctggctgcctatcagcaaggatgcctcacggctgcagcatctttctcttggtaacaggcatgtccgtgcaggctctgagctggtcccactctctccccatccccagaaagaactcatgcccaccaatgcagtgtggagggtgcccagcactgagctgtgctgccgccagagggcccagcaggcagggcaggcggcctgggaagcaccttcctttgccctcacctcctgtcttctgtatctgtccttctcctctggttctctcacccacccacctgctgaaacaatccttgttcatctcttctcccccacctgccaggtgtactttcagaaaaggcagtggagttggggaatccccagtatgagttggagacagtgcagttattagcattcgtagccttgtctgtaagtgtagaacgcaaaactttaagcctgcttaagaaacatatgtttctactcaaggagcaggtaaagagattggattgtaggtggcctgggggaccttcctggatcctttgaacaagattcttgcttgcaggcagggatctgccttgtggtgctgatgcagggatggggacaggtcgattgagaggacttagaaatgaaactcctgaacttctcatttatttcccatggagtcaggagaaacaggacgaatctccaaattgcacgttcccaagggcaaagagcttgtgtagagattaaagagactctatgtaagagataagtttctcgaagggaaagataaaagacttttggaagagttgtacacgatttcaccggtgttggacacagaattgaatgctcccattagaattctggaatgcctttgtttggtttttcaggagccggatgaaacggccctccaccttgcagtcagatccgtggatcgaacctctcttcacattgtagactttttagttcagaacaggtaggtgttctgaaattaagggaggcactcgttttctccttggtatttctggggaaggaatcggacgctgcctcatcgcttctgatgtgttgtcaggagaaccttcccagttctaaacatgaattaaagacagaaaaaggactgccaggtgtgaggtactccatggcaatcctttaaaaaagcactagaaactcttttgtggtaattgcagggtccaacttctagtgtctggtactcagggagacaccaagtagatatggctactgaacttggggaccccatgaccaccctctgtgcacaggggccgtcctcgcctcatcctgtgagccaggtcatcgtactgcgcaagcagtgtcctgagcagtagggaggtagcaggcaaggagggatccacacattagccatggtctgagccagagattagaaaccagagcactggattatgggtgttttgtttgggtcgagaagttgtttttatgctttgattagaaatggcctttagagatgtgcacaggcagtttaccacagatctgggagtccccgtggtttggggcatattgcttcagtcatgtgttacctgcctggcagctgaaggctggacttcaagacccctcaacgtgtattttgactccctgatcgtggtttgagccatgtgtgtactggaggaggaggaggtgctgttaaaagccacagaaattgctccaaaggaaatggaaaattccaaaatgcaaaagccatgggatagtttgcattttgtgtcctctgctttttcctcccatttctgagcagaggagtgaagaaatggccagaaagtaggggagtgtggggtggtcaaccccaagacctgcagcttcttcctgaggaggctgagttcactggactcgtggtggaagctgccctgatgccccatctctgagtgccagcccggctcctagaacgcagcaggggtttcgtaaacatttggttgatagctgcgtgatgcctctccctccatgcacattttcagggggcaggagagggaaggtcccagtttctttttttccagagtggaaggaggacaaaagtgggggagaattctgaaaatgaaacacaccccccgctccccatgcccacaatttggtgaaaaagaaactccttttttgatattgaaaatgtaattggtttccttctcatggaagcagcaggtgccacttcctgagatcgcctttctgtctccactttgtgcaggggcacaaagctcactgcccctcctcagaatgtgacagtggccatgtttgctaggattgagggcctgtcccatgtctgccaagcctgagcaccttttgtgggtgacctggtcttgtgatatgttggaagaacttttgaaaatctcaagattcccctttagcctgttttcagagggtattcccagggcaaacaggccgaggagcctggggactctgggctttgggaaagtgacttttccctttcctggagggaatatcaaataatgatagagaaaagctcagcctccgtcctcccgtgggacaggatggatgagtcacacaggcatccagaggccctgcatccagcacagctggccggcctagcacagcagcctcggcgcagccagtgggacgtgagaaggacgctgggctctaggttcaccccggtagtgcactgccccaccttggccccacatgctcagcaacaacagggatgcccccctccccttttgacctcttctgccatcatcgtgttatttccctgatgaccttctgctaaggcttccccagccatgtaggcagggacggtgccaggtcccaccaccttggcgatgatttacagaaaccgttcactcggggactgtctgcctttcctgtgcccgtagcccaggctccctgccgggcagtccctggtcgtccagcctgtgacacactatgctctctctctgttcctgttctcgggcagtgggaacctggataaacagacagggaaaggcagcacagccctgcactactgctgcctgaccgacaatgccgagtgcctcaagttgctcctgcgggggaaggcctccatcgagataggtgagtgggcccgggccccgggggtgggctcagctgcaccctggcctctgcctcctgtctgccatccaagcgctgctcttggaaacagggccaaccctgtgggctcttgttagtgccaaagagaaggagaacctaccgctaatgagaaagagcctctccctgcctgttccacgaggccgcattcaccatctgttacttagactttgggcgcgtttacaggcattttacagatcataagacaagcaaagggtgggtcttgcagctctcacggatgccaggtgaatttggacaaggttggggaattttgacctgttcacataccctgagtctactcacccccacctgaggccacacttggcccctttcttggctctgggtttagacggattacagggggagatgctgtttactgccctctcctttcatttgcaccactgcttcctccatgaagggccctggttgttacttggccccggtccctccctctctcgaggaccccgacatgccaacagccaaggcacagttgtgccttgagagcatccagctgttgtcccctcaggaggaagtatttttgaaggactgttaaataaagaggaaagaatagaaaaaagacacacatctgcctgagagccgtgcttatcattaaaaaactaataatcagacctcattgactgaggcttatttagaagaaattataggccgggtgcagtggctcacgaggtcaagagatcgagaccatctggccaacatggtgaaaccctgtctccactaaaaatacaaaaattagccgggtatggtggcgcgcacctgtaggcccagctacttgggaggctgaggcaggagaatcacttgaacccgggaggcggaggttgcagtgagctgagattgcaccattgcactccagcctggcaacagagcaagactccatctcaaaaaaaaaaaaataaataaagtatatactttcagggtttatagactgcttgagagaaggtttaaaagtttgttatattgcagtgcatggaaataggtgagcagtgcttttcgttagaggtttatgatgaatcgctttattcaatgagttacagtttggatgtggattttaattaggtggctgcttcaacagtttttgtttttgtttttgttttttgttttttttgaggcagagtctcgctctgtcaccaaggctagagtgcagtggcacaatctcggctcactgcaacctctgcctcccaggttcaagcgattcttctgcctcagcctcctgagtagctgggaccacaggcatgtgccaccacgcctggctaatctttatatttttagtagagacggggtttcaccatgttggccaggctggtctcgaactcctgacctcaaatgatccacccacctctgcctcccaaagtgctgggattacaggcgtgagccactgcgcctggccagttttagtttcttgattagttcaaacttcatcttttaaagttttaccttctgtatttagctgtagttctatacaattacaagatacattcagcctcgactaggtcaaactcactgtggatttcattaaccaggcccaatttaatttagtgctgcctttctgttccttttaaaaattgtcctggatgtcaggcctttgctgggttttgccttaacgcctcctttgctcgcccttgaattttagcaaacgagtcaggagagactccgctggacattgccaagcgcctcaagcacgagcactgtgaggagctggtgagtctcccaccacaaggacggggtggggcacctgtcacgggacagggagccaagcctgtcctccttgggcagggtttgctgtgaaccagtgtcctgagcagagctcagtgtttctgatgggatgagccgagaatcagcctgccttggagaaggtatgctagggagtctacagggaaacctagggggacccacccctcgcagtgagacttggggtgtgagtcagtgtttgctggttggccgtgttggtaacatcactgctgtggtgggacaactggaacagaggcccgaggccaccacaagggcctgctctctggcctccgtaagctgtttacttgctactttgcaggacatcaaggccaacctcctttctttgttcctcagccccagatcatgtgggttgctcaataccatcttttcctgttctggaagaaaagacaatgtagacagtagaaagagcccaccaggccaggcagccctggccttgccgggggctccccagcttggcttgggaaggaaactctcttaggctgtttccttatttctacagtgcagtcagttataccagtatataaggttgttgtgagaattattatcaaatgctgtaaagcagttgacacacagcgctcagtaaatagattaaggccaggcacagtgactcacgccttgtaatcccaaagctttgggaggctaaggcaggggatgatggcttgaggccaggaattcgagatcagcctggcaacatagtgagactctgtctctgcaaatgatttaaaaactagcaacgcatggtggagcatgcctgtagccccagttacccaggaggctaaggtaggaggatcactttgagaccaggagttcaaagctacagtgagccataatggtgtcactgcactccagcctgggcaacagagcaacacgccatctccacaaaaacgtttcgaattagctgggtgtggtggcacgcacctgcagtcccagctactggggaagttgaggtgggagaatggacttgagcttaggagttcaagactacagtgagccatgattatgccaatgcgcaccagcctgggggagaaaaaaaagaactattaataataaatgctatacaagtgtaagataagtaacaggtcctctttctaagcactgtacatccacgagctcatttaatctttttttttttttttttttttgagatggagtcttactctgtcacccaggctggagtgcagtgacatgatctctgttcactgcaacctccgcctcccaggtttaagcaattcttctgcctcagcctcctgagtaactcggattacaggcacctgccaccacgcccagctaatttttatatttttaatagagacggggtttcaccatattggtcaggctggtcttgaactcctgacctcaagcaatccacccgccttggcctcccaaagtgctgggattataggcgtgagccaccacacctgacctgtctcatttaatcttcatagctaccttatgacatagtttctgctgttgtcctcattttacagatgaggacacaggcacaggaaagttaagtgacttggccagggtcatgtagctactatctggttatgggggaaattaagccctgaggtcctgagacacccatagtgtgtaacgaattaacttctcttctgcacatgtagaacggaactagctatctaccttccttgagagaactgagaaaatagccacacagatcattttctacagcgtttaattctctcatcctggttgaaaaggctgggtttacagtgaatgagcacattcattctcctggggttgagctttctcccatatggagtatggatacttgcaggctgatcagcatcctttagatctcaaatatcctttgcctgttgttttggggaaaactctagccctgttttttctgtacggttacactgttgtcacaacaagcaatacagaagcagactgctgtgaccaaaggtgtggggttctcccccgaccccatacaccaattgtagtcgcctgacaggttcttcttgcctgctgcatagattaaacccaattcatgagacagtgtgattgcagcagagaaagagtttaattatggcaagctggctgagcggtgggaggacaggaattattactcaactgtgtccccacaaaggctcagaggttagggtttttcaaggatggttggatgggcaagagggctaggaaatgggtgctgctgattggttgggagtgaaatcataagagtatgagaaacagcccttgtccactgcatatcatctcgggggggccacgggactgtttgagtcatgagtcaggttcagtggagtcagttggtcaccaggatgcaaaagtctgaaaaaatatctcaaaagatcagtcttaggatatgttatctataggatcaattggggaagtcacaagtatcgtggcctctggtgcagtaaacaatttttttaaaaaaagacagtgtctctctgttgcccaggttggagtgcaatggcgtgcttgtggacagcctcaaactcctgagctcaagcgatcctctcacctcagcctcccgagtagctgagactacagatgcatgccaccacgcctggctaaaaaagtttttaaattttttgtagtgatggggtctcgctatgttgcctgggctggtctcaaactcctggctcaagcagtcctcctgcctcagcttcccaaaatgctgggattacaggtgtgagccactccactggatggtaaacaattacattaatagagaggcaagctgcacctacattttagcagaattcagacccttcccataatcctaatcttgaggcctttcattagtcttccaaaggcactttcaagttccctaacaagaacagagtcagttttcacatgcacacgtatgtttattgcggcactattcacaatagcagagagacttggaaccaacccaaatgtctgtcagtgatagactggattaagaaaatgtggcacatatacaccgtgcaatactgtgcagccataaaaaaggatgagttcatgtcctttgtagggacatgaatgaaactggaaaccatcattctgagcaaattattgcaaggacagaaaaccaaacaccgcacgttctcactcataggtgggaactgaacagtgagaacacttggacacagggcggggaacatcacaaaccggggcctgtcatggggtggggagacgggggagggatagcatcaggagatatacttaatgtaaatgatgagttaatgggtgcagcacaccaacatggcacatttgtacgtatgtaacaaatctgcacgttgtgcacatgtaccctagaacttaaagtataataaaaaaataaattaattaaaaagaaaagaacagagtcagttttagggagggactattaccatccttgattcaaacttacaccacaaactaaattcttcccatggttagcttggcctgtgcccaggaataagggaggacagccagcctgtgaggccagaagcaagatggagtcagccatgctagacttttttcactaccatgttcttgtaaaggcggtttcacaagcagcagacaccagctggctgtcctccagttcaattagacactatctacttggaggtagtgttagatcccacaggctgggggctcagtccccaagactgtcttccaccccagacaccagtcacaaatcaacctccagaacttctgaccaaccggcttcaagttggggttcccacagccccctctttgggtttgaataatttgctggagtggctcatagaactcagggagacacttgtgtttactggtttattataaaggatattgcaaagcatacagatagagaggtgcgtagggcaaggtgtgggggaggggacatgggggttccatgccctccctgggtgccaccctccaggaccctctgtgtggtttgccatcctgaagctcgagaaccagtcctctttgatttttatggaagcttcttggtgtcagcatctcttcccccagggtacagggtgagaccctctctggggagggccttaagacccacagtcagaaaagtgggggacgataagagtcctgccttggggcaggagaagttcagagagattctgtctcctgaggccttaacactccatgttataaccgaagactgtaacaagggatttgagagttacgagccgggaactgtggatgaaaactaatacagtttacaaagcctttgctgggacataccagctttgagtttcaaggttacgctgtgaagtaggcagaggggcgggggcttcacctgagacccagagatttccatgcatttgccttggactagaaggcaggcctcctgcctgcacacttcagtgggtccagatgcatggccgagtgtatgagcaacagcactgaccatccctctgttctctcagctgacccaagccttatctggaagatttaattctcacgttcacgttgaatatgaatggcgactactccacgaagacctggatgaaagtgatgacgacatggatgagaaattgcaggtctgtgccaggttgctaaccattaagagttttgatcagcttcatccagaacagtgtgggtcctaatctgtaattaaggcagaaagctgttttatagaaatgaaaatgtagcttactttatgctttcattgatctcagtaggctcttggttttacccttcccactaccatctcctgtctcccagctcctgcacccattaatttaaaggaatggctaattatgtacttataggcagccttttgctacaaaggaaaggtgtgtgtggcgggggggttgattccagtggatttagaggaaggtctcttgctatggagtcatgtcataaagagccagatttcccccagtctaggtgatcacattctcctggttgatcttataaaaacatcaactgaaatcatcagacgacctttagagctcactgggtccaaccccttcctttatcagtttgggatattgaagcctcaagagaaaagttgacttggccaaagtgaagcagctatttagaggcaggcttgggactgcacgaaggctcttgcctcctcctccagctcccttcttaccatcctcactgcttcatacgcaggggtgagccccaggaaggttgctgccttcacgcaggacttggagctgagagtcagacttaggccttgtgacccaaagccctggctcctagccgcgacccacttccatctgtccttcagcatggtgcttcgaggcatgtctggaatgtgctctgtgctgaattagtggcaaatgccacattaaacacattttcatggtttggcttttttttttttctgtaatgcattaatgttctgatgtgtattgaggatatctaattagatggatggataggtcagtaggtaaccagatggcatttctgaaacctgttggactgtctgctcatggagttaacatccatacttaactgcttcttagaatacagaataagaaattacttcactgagttagctacaaaacactgtcaaagtgagaagagttgactgatttcatacttaacctgccttaaaaaaaaaaagctggaagcagtctgccccagcctgcctcttcatcaagcggtcagatgccacattcccatttgatgagcagtgatgaagcaggttgcatagtccaaggaaaagcacaagagcaggggctggtgtggagtcctaagactcatccacgctgctcacctgattctcagcagacagcagccgtgggctttgcaatttagaaatatgtgtgaagaaccactgggtgcttagttctgcacacctgagctgggtttgaaccattggtttgtccagaacctagaaagggttggtggtcctgtgagggagaggcagggctgccacagttcatactgagcacctgctaagcacctggcattgtgctagaaaagcactcgtcatatccagtgaacagacaagaatgtggtcagcaaggttgagtcatttgctcacaatcatacctagtttaatgaagctggcatttgaaatagaagttaggtctaagttacctgagtcatcattccatgcattcacttccaagaaagcacatgaccggccgagcgcgggggctcacgcctgtaatcccagcactttgggaggctgaggcgggcggatcacgaggtcaggagattgagaccatcttggctaacacggtgaaaccccgtctctactaaaaaatacaaaaaaattagccgggcttggtggtgggtgggggggcgcctgtagtcccagctactcaggaggctgaggcaggagaatggcgtaaacccgggaggcggagcttgcagtgagctgggattgcgccactgcattccagcctgggcaacagagagagactctgtctcaaaaaaaaaaaaaaccatataaccttcaggggggagcaggggtggccaaactcttaaagggccagatagtaaatattttaagctctacgggcctaaagcgtcacagtccatgttaacaattactcagctctgccaggatggctcaaaagcagccttagacagtatctaaatgacaggacatggctatgttccaataaaactttactgacaaaaaacaggtggtagtccataggccactgtttgctaaccctaatttggaggaatctcaggagctcctgttcatatgggaggaaaacatcgatctctgctgaatgagccatatagctgttggagattgagtgcagcgggctggccagagctggccaccctgtggggtagcataagaaggcatgtttgggaaggggaacttcagggaaaatgctgacttaggttgagataacttcgactcataagataaatagcttatattttaaatccatcacagaatggagaattttaacctgtaattaacagattttttggtatgtgtgtgtttactagtcagttcttacactgctgtaaagaaatacctgagactgggtagtttataaaagaaagaggtctaattcactcacacctccacatggctgggaaacatacaatcatggcagaaggggaagcaggcacctcttcacagggtggcaggagagagagcaagcgagagcagggaaaactgccttataaaaccattaggtcttgtgagaactcactatcccaagaacagcagaggggaaccgctgccatgatccagtcacctccttccctcgacaagtgaagattacaattcgaggtgagatttgggtggggacacaaagccaaaccatatcagtgtgtgtttccttcacgagacacaaggaggagtgaattttcactcttgcagctctcacgcaacttgtagctctcaggcaacagttgagagctcaaatggtaccaggcccagcagagttggtgtcagtgaggttttcacccctgtgttgaatgttatcaccaggagcagttcatatttgtctcacacgcctctgccccaatgttctcctgcagcccagtcccaaccggcgggaagaccggcccatcagcttctaccagctgggctccaaccagcttcagtctaacgctgtatctttggccagagatgctgcaaaccttgccaaggagaagcagagggctttcatgcccagcatcttgcagaatgagacttacggagccctcctgagtggcagcccacctcccgcccagcctgcagcccccagcaccaccagcgcccccccgcttcctccacggaatgttggcaaaggtatgaagctgtccgtcatccctgtgaatatatagagggtcttgttttgtggtttgggaagtttgcagctgccctgcctccaactcagtgacctttgggctcttttgttttgtagttattttctgtttgcttcctaaagggattccatcattcttatcaggccagatggtggtagagtctcttgatttgactcttattctgggcagagttgtggcatctgcctggcttgggtaacatgggaactcccccagggcagcctgaggtggccaactgggctcccggggctgggccaaaagacacactccttcaggtctcccctctgcacccttctgtttacctttctccactccttcccaggccttcattcttcctttttatttctcttctgccttcatctggtccagctcatggcccctgcgattacttcttacccatgatccccataaaagatattggggaacgatgctcggcctaattgtaaaatacaaaaccagccctgtgggcctaccagtgtcttagggcaaaaagcatgcttttcttacctcagctgtaacctggaggttttgactcaacaggtgacactttctgtttttagaaatacgcaaaccaaagctctcagaagttaagtaatttgttcattcctgaagagcagctggctacggtgcttcttgaaggcaggtccggcgagtgacccactcagctctgggctgagctccagtcgtggccatggccttcagagggtttcccacatgaaggaggctgctgagactttgatgcggggcggggggcccaggaaggacaagagtctgcacagagcatgtatccaggcattgtggccgctgtgagccgctgatggagtggagcccacgtccccaaatacatcccaaactgtccttatgtggtagctgctagctgggcaggctgggtcggtgcgtgagggtggctgaggccgggagacctggcccagggctgagcagacggctgcagctttgtgctgcacgtacactcggctgtgctgctgggcccatcttccctgccgtcctgggtgtctcacagaccctcacacggctctgcccctgtcattcagggaggcccagagaagtgacagtgaacctgtcatgtgagtcactgagtcataccccgaagaacaaacctgctgagagcagaccttcccccaggcaggcccagaagccagctgcttgctgtccccacacagcccacatcccagaccgcgtccatccctggcttgatgaggacgtccctgagcacagaaggcagctacaagatgaagccacacagtcgcatctcctccctgtcaaacccccaggctggctggtcggggcccagggtgggtgcggctttctccccgcctctcccagatcctgcaggcaggcatcaattttctacggcccacaatcaagatgattttgatcatcctccttcccagcagtggcttttgctgactgtgtgtgtcacgggaggaaagattttattttgttccactgggtcatggaggggtaaactcttaatctcctggtttcccgaagtcttggaattcaagggttttgattttttttcctttttctttttgccgttcctgtccctagcatcatttcttcttccagtaatgtaggtcataccccttacctgccatctccaccattctctgtgtagcccacatgtggtcttggatggaattctcacatgcagataaatagcaaatggagttgacagtgtcagccttgcatttggggcggacctggctccccaggggaggagctcgaaggcttcctctggacccagtggcctggcccatttctaggcctagcctttgccctacaggccgtgcacagcctccaacatggggtcacacctagcacctgggccctgtgcacctgagcttggaggtttgtgaggcagaagaagggcttgtgacctggaaaatgccatctcttgtgggtcacctgaacctgattggtgtcatctgtgtctgcttccagccagaaatatgtttgcgggagggagggagagagagcccctcctctagtgtctgatttgcactctgcccccaacctgtgccagctgggcacacggtgttcctcttcacatggtggtgactcccacagcccatgggaaggagtcggtgggagggtggagaggagcagaagttccagaagctccaagtgcagtgttcgcaagagaacattgtgactgtttatttccttcttcaaatgatactgatatttgataaataaactcaggaattttaaatttcatggattgagaaaacctgctgagaatagtccttggagcctcttcggtttcgcgagtatcagtgtctatcttccacatgccggagacaggagtaaaagcattgagggttctaggtagaagggtcatactgaccgtttcataagggggaggatcaataacgcagtgttctgtttctgtttttgttcgtgtgtgcacgtgtatgtgtgcgtgcatgcgtctgtgtgcatgcgtgtgggttcagttcagacagcctcctctgctaacaccctgtggaagacaaactctgtaagtgtggacggtggaagccggcagcgatcttcgtcagatccgccagctgtccatccaccgctgccccctcttcgcgtgacatctaccagtacgtttttttcctttttcctttcttgcccgtgggctttgtagatctggatggcggggggtgctctctggagccacacagctgccagcacagacacgtgccaagtgccccgtgttgtatggctccctgtggctcttgtgcagggctctcagctcccccagcctccttcgtcacagctgcaaacccctgcctgtccccacactgcaccaccaagtagcttcctcactcccttcctctgtcttccaaagcatttcagcaacatttcctcctttacacagtaccccagggtttctttttcctttggccatttggtgattttcaatattttggggacagtcacttggattagaatctggctttttgtttttcttttctttttctttttttttttttttttgagacagagtctcactccatcgcccaggctggatgcaatggcacaatcttggcttgctgcaacctctgcctcccgggttcaagagatcgtcctgcctcagcctcccaggtagctgggattacaggagcctgccaccatgctcagctattttttttttttttttgtatttttagtagagatggggtttcaccatgttggccagcctggtctcgaactcctgacctcaggtgatccacctgcctcagcctcccagagttctgggattacaggcatgatccatggtgcccagccttgtttttctttttaagacagggtctctctttgtcccccaggctggagtgcagtggcacaatcatggctcactgcagcctccaactcctgggttcaagggatcctcctgccttagcctcctgagtagctgggattattggtgcaagcgtattttttgtagagacagggttttgctatgttgcccaggctcgaattcctgggctcaagtgatccacccgccttgtcctcccaaagtgctgggattacaggtgtgggccaccacgcccagcctggcatgttttctttaatatcaacatgtggttgaaagtcctgaaaaccttgggtaaagaagcgggaggaggtttttaggaagaagtttttctccagtgtacagaactaaagtcttttttcactggatcagagaagcgagccctggatgctgccctgtctcctgctgcagcagccctggagtggggagtccagcatctctgggcttcattgcttccagagcatgagaattctagagccgaggtgctcgtgacttccttagagtaagttaaaattaaaagcagcccagccccagctagagtcagtgccatgtgtgcacatgccggcagcagagccgggagcagtgggtctgggagggtcttcagaggtttccaaggcgaacacaccaaaggccagaaggaaccactttcctgcctctccgtctggtggtccaggggctgcatttgtgtgctagagtcagacttttgagttttcctttaaattggaaaaaggaaacaataatgataaaaagaaagatcataagctggatcccttcatgtttccccacgccagtttcctctctgtgtagctgaaggcctcattcttcctggcttttcctggcagagggaaacccagcgccttatgtgttacccatcctgaggcccagtatgataagcccgacatttagagagggcttaatgcctatcaagggaggagagacggaggaaggagacttggactcacagcctccctccaggtcttaccagctctgccacccttgacgagagctcttcccctccgtgggcctcagcctccttgtctgtaaaacgtagacactaagaaagctcttcacccacccactccggagactgaggagccgttactaagttagtagctcccatctctcctcagatccaccctgcccagcagcccgatgaagtgggtagggcctcatccctttggccacaggtcagtcgatgtgcaaagcaggccctgcttccccgggcagagctgagggccccggcctcctgctgttgggtctttgagtggagagcaggaaactgctggctttcccccagggagttctagctgagaaaatactcactcacaggctgatagaaaaattgtcatcctaactttaggctcccagcttccttattagtttggaaaggactccctgcttcctccctgtgaatggttttctgaaaactggcaaggaaatagcagcaggtttttccttaggaaatagcaataaaaaactgaagcccttctcagaaaagcctccagtgaggaggcctgagtgggaagcctggcggctgaccctctgcacgtctctccctgtcctccgcagatcccctgacccccacgccgcccccacccgttgccaagacgcccagcgtaatggaagccttgagccagccgagcaagcctgccccgcctgggatctcacagatcaggcccccacctctgcccccacagccgcccagccgcctcccgcagaagaagcctgcgccggggtaagccacccccagccagctcggccatccgtgctcctgccctctgacctcacctgcccagggctctgcaggaatgtttgcaatccccagggctcctactccagcgtgggcgccacataactaattcatcggggctgaagggtcttaaaaataactggaggatttttagactgtaaaaatgtcttacaaatgtacattttaagtccacagaatgaattcagacaaagtgtcctcaacacacaaggcttctgggttctatttgctgctcaccccccaggtggtctctgtttctgttttctattttcccaaggttgttttgaacacatagaccctctgtggtgtgaggcgtggatttcccacaaacaaggacattgtcctacctcacacaataccacctgcaaaatcaggaaattaacacggatgtagaaacaccacccaatccttagacccaggtcaagcttagctgtttgtccaaataatgccccttgttgcagatgggtctagtttgtggctttttttttttttttttttttttgagactgagtctagctctgtcacccaggctggagtgcagtggcgtgatctcggctcactgcaagctctgcctccagggttcttgccattctcctgcctgagcctcccgagtagctgggactacaggtgcctcccaccacgcctggctaattttttgtatttctagtagagacgaggtttcgccgtgttagccaggatggtctcgatctcctgacctcgtgatccacctgcctcggcctcccaaagtgctgggattacaggcgtgagccactgcaccaggccccagttcgtggctcttaatctggatctttatggtgggaaatggttccttttagtggaaatgatatttagaggccaagttctgggggctaggtggagagtcactgctcccacacaggccctctgagctgttagaacttggaaatatacgcacatgtacatggatacatacatacaccacttatctctctattccgtatatttctgtattgaaatccatgagttcacattgacatctctgatttcagttgttctagtaacaaaccacaccagactgacagacatgaggcacagccagtttattctgctgacagattgtcaggaatttggatggtactgtggggtcttcgtcttttctccacagtgtctggagccttcgctgaaaggactcgaagcctgggggtggttggacacaggaggtgactcgttggctgggggttacggtcagagtctcttcacgccccccgtggtagctgacgctgcctgtcagccagagcctcagctgggctgtgaccagaacacctacatgtccctggcatgggcttcctcatatcacggtggctgggtccacggacaggtccccagagagaggcctggccctggaagctggcacggaatgacttccgccatacgtcactgctcagttacaagctcagacacagtcggggcagagaggactgtggagtggcacaaggaagtcatcagttccacctctcaataaagaatttggggccaggcgccatggctcacgcctgtaatcccagtactttgggagaccaaggtgggcggatcacctgaggtccagagtttgagaccagcctggccaacatggcaaaaccccacctctactaaaaatacaaaaaaattagctgggcatggtggcatgcacctgtaatcccagctactcaggaggctgaggcaggagaatcccttgaacccaggaggcggaggttgcagggagctgagatcacgtcattgtactccagcctgggcaacaagaatgaaactccatctcaaaaataaaaaaataaagaatttggagactaggcaccatggcccacatctgtaatccctgcactactgtgtttttgtttttttgttttgttttgttttgtttttcttgtgttttttttctttttttttttttttttttttttttttttttgagatggagtcttgctctgtcgcccaggctggagtgcggtggcgcgatcttggctcactgcaagttccgcttcccaggttcacaccattctcctgcctcagcctcccaagtagctgggactacaggtgcccaccaccacgcctggccaattttttatatttttagtagagatggggtttcaccgggttagccaggatggtctcaatctcctgacctcgtgatctgccctcctcggcctcccaaagtgctgggattacaggcttgagccactgtgcccagcccatccctgaagttttttaggagtagagaaataaagttaaacttttacttagtccctctgtttttcaagatattcccaatagccgcacctggtatcccccatccagacaccgtccgttttgccctctccaagaatagaagcttcctgtccttagtaggttgggcagggcagcggctaaggctactcagagctggggcgagattccaggggttcaggagctcctcagacagatttttggctaattcttctgcatactaccttgcctttctccccttccagagggtcctgagccttctgaggacacttcaggactacagataggagcatttcagggccttcctcactgctggagtgggattccattcctgagatcaactaggttgactgtgatttatctttcactctgttgcccaggctggagtacagtggtgtgatcacggttcaccgcagcctcgacctcctgggcccaggtgatcctcccacctcagcctccgcatagctgggaccacaggcacgcaccaccatgcccggttaatttatttttatattttgtagaggtgggggtctccttatgttgcccaggctggtctcgaactcctgggctcaagcagtcctcccaccttggcctttcagagtactgggattacaggcatgaggcactgcgcctcacctcttttaggtttaatttttaaaaatccttttccttggaaagaaatggaagtaaatgtacttaaatctgccattttaaccagaagactcccaaaactttttaaatgctactttgcaagataactttctaaaatataacatgcagggctgggcacagtggctcacacctacaatcccagcactttgggaggccaaggtgggtggatcacttgaagccaagagttcaagacctgcatggccaacatggcaaaaccctatctctactaaaattacaaaaattagccgggcatgatggcacacacctgtaatcccagctactcgggaggcagaggcaggagaatcacttgaacccaggaggtggaggttgcagtgagccaagatcacaccactgcactccagcctgggcaacagagccagactccgtctcaaaaaaataaaaataaaatatgcatatctgtgccctcctagtcttaaacagctactgaattatgctgtaataaatgggctttccagtgctaattatttctgcctctataccaaagtggccacaggccatgcttctcttggcttctgggctctcttctgccttcccttatgactccctgggatttacgctttccatgctgctgtttttcgagagaaacaaatcacgtgttgaagtcctggctaaggagccgtcagctcccagcagttattgggactctgagaaccgtggttgtcagctgtgaggtgcaggttccttgttctcagaagcgttctagctggcgggagctggacaggtttcctctggaacacaattttacctggtttcacatctgactggcaggaaaaagggaagcagggcaagtgaggttagggctacccgggacagacggggatggacggagccatgtcgtcagcgcccagtggagttctgactgtaaaggaacacaccggtacgccctccttgtgaaggatgctatcccttccccaccaccggtgattttgtctctgggataaatgtgaattttcacacctgttctcttagggtaggagtcagcaaactatggctcacaggccacatccagcctgctgcctgttttttagggccatgagctaagaactaagaatggcttttatatttgtaattggttgggaaaaaaaaatcaaaaggatatatatatatatatatatatattttttttttttttttttttttttttgagacggagtctcgctctgtcgcccaggctggagtgcagtggctcgatctctgctcattgcaagctccgcctcccgggttcacgccattctcctgcctcagcctcctgagtagctgggactacaggcgcccgccaccacgcccggctaattttttgtatttttagtagagatgaggtttcagcatgttagccaagatggtctcgatctcctgacctcatgatccgcccgcctcggcctcccaaagtgctgggattacaggcgtgagccactgcgcccggcctcaaaaggatattttgtggcacatgaaaattgtgtgagattcacttcagcactcagaaaatattattggaacattagccacacctgtttttttatgtagtctggggctgctttcacaccacagtggcagagttgaatacttgaaacagagatgctagaatccacaaaaccagctgggtgcagtggctcacacctataatcccagagctttgggaggccgaggcaggaggattgcttgagactaggagttcgagaccaggctggaaaacatagtgagaccatgtctttacaaaaaattttgaaagttagccaagcatggtggcgtgcacctgtagtcccaactactcaggaggctgaagcgggaggatcacttgaccccaggagttccgaggctgcggtgaactgattgccgcactgcactcgagcttgggtaatagggcaggaccctgactcaaaaaacaaacacaaaggccaggcacagtggctcacacccgtaatcctagcactttgggaggccgaggtgggcagatcacctgaggtcaggagtttgagaccagcctggcccacatggtgaaaccccgtctctactgaaaatacaaaaaatttgctgtgcgtggtggtgcacacctgtaattccagctactcgggaggctgaggcaggagaattgcttgaacccgggtggcagaggttgcagtgagccgagattgtgccactgcactctaacccgggtgacagtgcaagactccatctcaaaaaaaaaaaaaaaaaattcacaaagcctaaaaagtttactatctgcctctttaaagaaaaagtctgctcactgctgtctcagaggatcaggccttccctgcgagtgttctgtagttagggatgactgccggccagggggtcagccaggtcagtgtagtgatgtctgcagagacatttacacccagagacacagatggaaaacaaatggctagactggtcaaatgggaggggtctttgttttatggaataaaacaaagttccttttcagttccttcagcgtatgagcaaaacccatgtgatgttttctctcccttcattctgggactgcaagcattgaggccagacagggttcattccgagcagcgaagggagtgtcgacagacgggagcgtacagtggaaagaatcccatccttgccttccccttcccttcctccctggtcttcctcttctgcttctccagcccccgtcctgtgcctggctttatgctaggtccaggagatccaccggggagctgaagccactggcactggtccttagctctggagttgacggatcttgtgtcacaccttttgcagatgaaaatgctgactctccagaacccatttatccagggctgccaggtggcaggttcgagatgagggacccctctctgccagccctgagaactacttcctcactcatgtgtttctaccttgtggctttggggtgtgctggcccagaggttcatggatggggcttgagcccgtggtcagccacattggttcccagaagcagggacggcagaggcatggacagcgctgacccagagtgctcggacccgtcctggcaaagccatctgggcctgaggttaaggttcagccctgccctttcatgtgatgggaccaaggcagggaaggggctgagcagactcggggcggggccagtggccagtgcccagcatcactccagaccctggccatcggtggcaggctcacgtggacagagtgctctggaaaagccctggttttaggatcagaaacgttgaatttagcactttcctcagggcctctcattcttccttttcccataaaaaagagacagctaagtgacagtggaggaaaccacctcacacactctgagcttgaactcagaaggttctctgataaaaggggatgagaaaggggcaggtgccctccggtagcagtaaatctactttttccctgtctttgtagggctgacaagtccaccccactgaccaacaaaggccaaccgagaggacctggtaattatttaatttgggactgagtttgtttctgcttggtccatgggggcaatgtgggggatgtttcctgccaggtggtcaggactgagggagggcccagctgtctgccattccacagccctcctgccccctcccctcctgccccctcccctcctgccccctcccctcctgcccccttcccctcctgccctcttcctctccttccttccctccttccttccttcctcccccactcctgccttcctctgctcccttctcctcctctccccctccctcccccatctcatgccttcctcccccgccacctgccttcctccacccctcccttcccctcccctcctctcaccctcctccctgccttcctcctccctcctccctcctgccatcctccctcctccctcggcctctgagacccctgctcctgagcagctcagtcctggggcccctcacctgtcccctcctgctgacatggcaggctcactgggggacactcgctgccacacaagctctccaaggtctgcatccaagtcagaaggttccctttcccctcaacagatcggaacacctggggaaacctgctttcagacacaccctgtggcttgtacattgtttacatctcatggctgtgattgatgggatgtcttaagctgcttcatttttgccctacagtggatctctctgcaacggaagctctgggtcctctgtccaatgctatggtcctgcagccccctgcacccatgcctaggaagtcgcaggcagtaagtgacgagccccctttcctgcctctctgctctagccaggggggtgcaggtggtttcacaagggctcaggggaagcaagtcttcccctcttcccctggctggggcagggcggggctcttcttggtacctgactgcttggatctgggcagctggtgggtttggccctcctgccgcagctccacaatgggcccactcagagtaccctgccccggccgcttcgtttcccagcccttggccccttctctctgcttggtggggagctcttcccttttctctccctggctcctgagctgcactgacctgccccaccttggcatctgcaggcttctcaggcctaggtacgggactcctgagaccggggaaggcagggtgcttgagctctctgccctgagagctgaggcctgcagccacactaaccgttgttccctctcctgacccagaccaagttgaagcctaagcgggtgaaagcgctctataactgtgtggctgacaaccccgatgagctcaccttctccgagggggatgtgatcatcgtggacggggaggaggaccaggagtggtgggtgagtcaagggtgggcctgggaggttcctgggggctgagccacgtccctgcccacctggctggagagacgggcttgcaggtgaggttttctcagcctgagcagtccagatgtagttcctggtgcctccgccccttagcatcctcaggagctgcttcctccatggacacccccttctgagcaggcctgattattccccagggtggcttcctcccctgttagggtgcagtttccacagcactcatgagggcctgaaatgacactccttcattttgaggtcttgagtttctaggtcatcaccccccattgctggattagtggaatcgggtgtctggagagagctgacctagagcgcagagccccaggcctgagtctggtcctgaaacaagctgtggccgcccaggcgtccagcagggtgtgggagcaagatgagtgccggccacctaagaattcagacttggccactcaggggctggtggcttggggcaggttgcttttatctttaagcattagtgggatcatctgtgacagggaggtcacacacacacagtctggtgcaggtgatcttgtgagcacccactaagcggcagctgcagacagtgagggcggtggatgaaccggcttgaatggggcgtggacagaaagccccaggctgagcccaccacacagtagacgcaagtggcacagctccgcaactgagctcagagcagacagttcagctgggaactcacaggatttaggggaacttctttgtcgagtgcgaggagtttggacactgtctttagtcactgtccctcccagaactcccactagtgtttaaactgcatgtcttcagcctccagaggcgctgtgagctctcagggccaggcagcactgccttcatttggcagagctgggttcaccggtctttcctgtggcctcgtttgcccttaatggattgaaagtgtctgtggcctgggcgcggtggctcacgcccataatcccagcactttgggaggccgaggcaggcggaacacttgaggtcaggagttcgagaccagcctggccaacatggttctctactaaaaatacaaaaaattagctaggtgtggtggcaggcacctgtaatcccagctactcgggaaccagccagctcccacagttgcccacaacccaccatccggaaggggcgccaacctgaccacaggcttagccatgtggaaaatacctgctcatttccaaaactggaaaatagaggcataaagaagaaaacagaagttgcccataaccacagcaccccccacccactccacaaaaagcccaccattcatattttggctgtttttagccttttatttgcctacatcatttacactcttgagatcatatttggatataatttatgtatctacccaagagggaacataagtggatagagtgaagccttccacaagtacttaactcattgaaatggggccaacttatacctttgccactttaggtgacgttgcagctcacaaacttgtgacactcagttcattcattcattcattcattgaaaaatggcaagtgggaagtagtggtcagacagctgacctgtgtgcctcccaagaacaggtgggggtggccatccccacgagcgaacatctgggacatggctgggaagagctccttacacgggagaggcctgcactatttgaaatgtggtgaggaaaaacggacaaaaatcatttggatgttttacctaagtaattccttgtcggaagagtcttctgaaccaatcttgcttttcttcaccaaacgctctatgtaatgctcttcaaagtttccaccaacatttggaattttaataacaacctacacttttctccatttcagattggccacattgatggagatcctggtcgcaaaggcgcattcccggtgtcatttgtgcactttatcgctgactgaattgctactgaacaaaagcattaacagttatgttcctgtttcgttattggtaccaaaactcttgccagataaccagtttcatgaactgtttgtatggcagcccatgttctctaatgccactgctctgttttaaaaactcagaggcaatttttacatatcagtaattgtttttataatttgtggttttcatgaaacattgctatgcatttattaggaaaaactgaatttcccaacaggtgaactgaaaagttattttaactattatacataatcaagatcctgcctctacggaattagctaaacctaaaaatgtttgcattaatgaataaattcttcctgcattccttggcccagttctggagttggtgacctttatcacaattattattttaggcggccagtgaactgctgcttcagaagtccatagcccagctctgaactttctcgataaaatgccatcagttcacctttaaagacacacattcctttgaaatccacccagtgtttaaaaagcaacttggaaatttacacattagcattgtactttctagccctaatttgtgaggttgcagctatcattatattctgcatgtatgtataacctgttgtgaacaatcatacttaacaaaactactgatggtttatgacaacgtagggtaactacagttcattctgttccaggttatataaaactgcatttcctgaatttggttaaaaactaaggatgatggattgcaaaacagttcttttaaattagtttatatgctttaggtgttttggaatttgccttcttgaacttcctgagtcacacagaaagcaactgtacacagtagaattctgtggcgcagaccatgctgtattaacacatcacttgctgtttcctactgagtgtaccactgccttcccttctagcccaggagaatgtttactcagtttagtgtcttgtatttctataatactccaacaggaatggtagtcacactgtcttgaaattgaatctgtccatctgtttataatcaagaacatatcagaaatatataggtcccaggtaatactcccaaacatcccactttttactgtttcaggccatcatatcattcttaagctacttggggtggtagtagaggattaggttgtctattataaaaccaaaactcattcgtttaatgaacttgactgtcatacctctatttagtaattgcgagggtaagattcatagtaggaatattggaaattttggcactctgagaataaataggcatatgatacccacttggacttttaacaaaagtaaaggaataaatttgcatataggcttggaaagtgaggcagcaatgctgttaactgcatttgttgtgatggtgcatttgattgaagcagcttgtctttattatgcaagactgtgtagagttttttttttttttggcattgtactttttgtttttgttataaaggaagacagaacaaactggaatgttttatgatgttgtatagcaatcgctttttacctttcaaagttccgggtaaaaatgtgttatatctgtagttttttgtttttgtttttttttaaagcactacatctgttttcactaattgttaatttctgtttgaacccttcatttaattttctcatagatttaagtaaacagatgtattttgcacagtgcacttatgtctattttaacaatcctcctgcatctgtattttatagtcagccttttgaccacctggtgccagctatataaggaataaagttgattcatatcaacattagaactccagtcccaaactaatctgtcaggttcactggtacataaatacctaggaaatatttttccagtctacaatttggtgctattgtgcagtaactaatagtactcttaccagaggagaaattatattaacgaccctgctaatatcctttcttagttatttgctccttgcaaattaaaaaagcaactaagagaaagaaaaacattgtagatatctatttatatttaaagtttatgtttcatgaactgcagctgcaggattctggcattttgcatgccattctccatcagatctgggatgatggctcagaacatgtacacagactaagagtaactgtgtgatctgttaaggggtggataacataatatgcagcttaggatgctattttgagatgtatgatattcagttcattcacctgattactttggttgcagcacaactgtatatattgtataaccgaaattgattattttcattgtccttaatgcagtgatttataattagagcatgtttaataagtttactcttcttgttaactagtcatttgactggaaaaaaataaaatacttttaaatggacatggttttatttttaatgtttttaatctttaaagttttgtatattgacagtcctttaaaaaaagtacactatcatactgtacatgggatctttacatacttttagcatgagcggtaatcttttaaggttctcttaactctaggaattgtggttggccagcatgttatcttgaccagacacttctgaaaatctgctttgtgtgtcttaagttggcaatgtcactgttccagaccagcatgaatcctggtctccagtccacacctctgccggacagaggtccatgccagtgataccatgactgggaagccaccactgagcccatgtcctcagtcttcctcaggccttcagtgtgtgtcactgagtggacctctgtgacatctcgtcttcctcaggccttcagtgtgtgtttgtcactgagtggacctctgtgacatctcgtcttcctcaggccttcagtgtgtgtttgtcactgagtggacctctgtgacatctagtcttcctcaggccttcagtgtgtgtttgtcactgagtggacctctgtgacatctcgtcttcctcaggccttcagtgtgtgtttgtcactgagtggacctctgtgacatctcgtcttcctcaggccttcagtgtgtgtttgtcactgagtggacctctgtgacatctagtcttcctcaggccttcagtgtgtgtttgtcactgagtggacctctgtgacatctcgtcttcctcaggccttcagtgtgtgtttgtcactgagtggacctctgtgacatctagtcttcctcaggccttcagtgtgtgtttgtcactgagtggacctctgtgacatctcgtcttcctcaggccttcagtgtgtgtttgtcactgagtggacctctgtgacacctaggcttctgtgacacttaggttaagcttattagaagttgaaaaagacaaatgaagttttttagcccagaaaatagatgacttcattgagagttaactcactgtgtaataggacacattttaataaacaaatgatcagcattttacacaatccattttcttcagaaaatctagagcaagggataacttcattatttgcataacatttcagcattgcagtttgaaaacagctgaactttcagatgaagttgacttctacttgattgcaggattcagggtttctcagatgttaatacagagtcaaaagcggtggataaaaccttgcaaatggcttgtgcttgttcctacattacatgaaagatagagtaagagcaacattcatctgtctcttcgtgaacttaatttggctagcagaggcacacacctgaccctcttaagacctctcctaagcaagccgaccacacatgcctgcctgggtcagtggaacccatactatgagcttccctgcacgtgggccctttctgccctccttcagaggaaagcaaacagcgactgcagcctgcaaaggctgatcacgcagtctaggagggcaacaacgttcggaaatggaagaagccttcgg
